United States Patent Application Publication US 2025/0236838 A1 - sequence listing, part 3

SEQ ID NO: 1 - DNA, 5441200 bp, Escherichia coli (residues 3,627,469-5,441,200 of 5,441,200)
  source 1..5441200: mol_type = genomic DNA
ttcgccggggaacaagaaaggcggtctggcaaatgtggtggagaaggcactcggctccattgctaaatcgggtaaaagtgcaattgttgaagtgctgtcgcccggccaacgcccgactaaacgcggattaatttacgccgcgacgccagccagcgattttgtctgtggcacgcaacaggtggcttcgggtatcaccgtgcaagtgtttacgaccggtcgtggtacgccgtacggcctgatggcggtacccgtcattaaaatggcgacccgcaccgagctggcgaaccgctggtttgatttaatggatattaacgcgggcactatcgctaccggcgaagaaaccattgaagaagtgggctggaagttgtttcactttattctcgacgtcgccagcgggaagaagaaaactttctcggatcaatggggactgcataaccagctggcggtgtttaacccggcaccggtgacctgatttcttttggaacgtccctcgcaaaacatggccttagtgccatgtttttattgtttaaagtccacacatccattaataatgcatttgcattaccttagttcaagcttataatttgagcagaaaacaggctgtaaaaggacagtaaataatgcccgctaatgctcgctctaacgctgtactgaccactgaatcaaaggtcactatacgcggacaaacaactatccccgcgccagtgcgtgaggccttaaaactgaagcctggcctggacagcattcattacgaaattctgcctggtgggcaagtatttatgtgccgactgggagatgaacaggaggatcatactatgaatgcatttttgcgttttctggatgcagatatccagaacaacccgcaaaaaactcgtccattcgacattcaacaaggaaagaaacttgtcgctggcatggacgtcaacattgacgatgagattggcgacgacgaataatggattttccacaaagggttaatggttgggcgctatatgctcatccctgttttcaggaaacctacgatgctttagttgccgaagtcgaggcattaaagggaaaagatcctgaaaattatcatgaaattattcgttatggcgaggtgattggttacgccgtgcgcgcaatcccacgcggaagctggatcgacgaatcaatggttgtactaccggaagcgccgccgttacatacgctgccactggcaaccaaagtcccggaacccttaccgccgctggaaggatacacctttgagggctatcgcaatgccgatggcagcgtgggcaccaaaaacctgctcggcatcaccaccagcgtccactgtgtggcaggcgtggtggactacgtagtaaaaatcattgaacgcgatctgctaccgaaatacccgaacgtcgatggcgtggtggggctgaatcatttgtacggttgtggcgtggcgattaacgcacccgcggcagttgtacctattcgtaccattcacaatatttcgctgaaccctaactttggcggcgaagtaatggtgattggtctgggttgtgaaaagttgcagcctgaacgcctactgactggaacggatgatgtgcaagctattccagtagaaagcgccagcattgtcagtttgcaggatgaaaagcatgtcggttttcagtccatggtcgaggatattttgcaggtcgccgaacgccatctacaaaaactgaatcaacgtcagcgagaaacctgtccggcttcagaactggttgtcggcatgcagtgcggtggcagcgatgcgttttctggcgtaacggcaaacccggcggttgggtatgcgtctgatctattggtgcgctgcggcgcaacggtgatgttttcagaagtcacagaagtgcgtgacgcgatacatctgctgacaccacgcgctgtgaacgaagaggtcggcaaacggctgctggaggagatggagtggtacgataactatctcaatatgggaaaaaccgatcgcagcgccaacccttcgccggggaacaagaaaggcggtctggcaaatgtggtggagaaggcactcggctccattgctaaatcgggtaaaagtgcaattgttgaagtgctgtcgcccggccaacgcccgactaaacgcggattaatttacgccgcgacgccagccagcgattttgtctgtggcacgcaacaggtggcttcgggtatcaccgtgcaagtgtttacgaccggtcgtggtacgccgtacggcctgatggcggtacccgtcattaaaatggcgacccgcaccgagctggcgaaccgctggtttgatttaatggatattaacgcgggcactatcgctaccggcgaagaaaccattgaagaagtgggctggaagttgtttcactttattctcgacgtcgccagcgggaagaagaaaactttctcggatcaatggggactgcataaccagctggcggtgtttaacccggcaccggtgacctgatttcttttggaacgtccctcgcaaaacatggccttagtgccatgtttttattgtttaaagtccacacatccattaataatgcatttgcattaccttagttcaagcttataatttgagcagaaaacaggctgtaaaaggacagtaaataatgcccgctaatgctcgctctaacgctgtactgaccactgaatcaaaggtcactatacgcggacaaacaactatccccgcgccagtgcgtgaggccttaaaactgaagcctggcctggacagcattcattacgaaattctgcctggtgggcaagtatttatgtgccgactgggagatgaacaggaggatcatactatgaatgcatttttgcgttttctggatgcagatatccagaacaacccgcaaaaaactcgtccattcgacattcaacaaggaaagaaacttgtcgctggcatggacgtcaacattgacgatgagattggcgacgacgaataatggattttccacaaagggttaatggttgggcgctatatgctcatccctgttttcaggaaacctacgatgctttagttgccgaagtcgaggcattaaagggaaaagatcctgaaaattatcagccgttacatacgctgccactggcaaccaaagtcccggaacccttaccgccgctggaaggatacacctttgagggctatcgcaatgccgatggcagcgtgggcaccaaaaacctgctcggcatcaccaccagcgtccactgtgtggcaggcgtggtggactacgtagtaaaaatcattgaacgcgatctgctaccgaaatacccgaacgtcgatggcgtggtggggctgaatcatttgtacggttgtggcgtggcgattaacgcacccgcggcagttgtacctattcgtaccattcacaatatttcgctgaaccctaactttggcggcgaagtaatggtgattggtctgggttgtgaaaagttgcagcctgaacgcctactgactggaacggatgatgtgcaagctattccagtagaaagcgccagcattgtcagtttgcaggatgaaaagcatgtcggttttcagtccatggtcgaggatattttgcaggtcgccgaacgccatctacaaaaactgaatcaacgtcagcgagaaacctgtccggcttcagaactggttgtcggcatgcagtgcggtggcagcgatgcgttttctggcgtaacggcaaacccggcggttgggtatgcgtctgatctattggtgcgctgcggcgcaacggtgatgttttcagaagtcacagaagtgcgtgacgcgatacatctgctgacaccacgcgctgtgaacgaagaggtcggcaaacggctgctggaggagatggagtggtacgataactatctcaatatgggaaaaaccgatcgcagcgccaacccttcgccggggaacaagaaaggcggtctggcaaatgtggtggagaaggcactcggctccattgctaaatcgggtaaaagtgcaattgttgaagtgctgtcgcccggccaacgcccgactaaacgcggattaatttacgccgcgacgccagccagcgattttgtctgtggcacgcaacaggtggcttcgggtatcaccgtgcaagtgtttacgaccggtcgtggtacgccgtacggcctgatggcggtacccgtcattaaaatggcgacccgcaccgagctggcgaaccgctggtttgatttaatggatattaacgcgggcactatcgctaccggcgaagaaaccattgaagaagtgggctggaagttgtttcactttattctcgacgtcgccagcgggaagaagaaaactttctcggatcaatggggactgcataaccagctggcggtgtttaacccggcaccggtgacctgatttcttttggaacgtccctcgcaaaacatggccttagtgccatgtttttattgtttaaagtccacacatccattaataatgcatttgcattaccttagttcaagcttataatttgagcagaaaacaggctgtaaaaggacagtaaataatgcccgctaatgctcgctctaacgctgtactgaccactgaatcaaaggtcactatacgcggacaaacaactatccccgcgccagtgcgtgaggccttaaaactgaagcctggcctggacagcattcattacgaaattctgcctggtgggcaagtatttatgtgccgactgggagatgaacaggaggatcatactatgaatgcatttttgcgttttctggatgcagatatccagaacaacccgcaaaaaactcgtccattcgacattcaacaaggaaagaaacttgtcgctggcatggacgtcaacattgacgatgagattggcgacgacgaataatggattttccacaaagggttaatggttgggcgctatatgctcatccctgttttcaggaaacctacgatgctttagttgccgaagtcgaggcattaaagggaaaagatcctgaaaattatcagagaaaagctgccacaaagttattggcggtggtccataaagtgattgaggagcatatcacggtcaatccatcatcaccggcattccgtcatggcaagtcgttaggctctgggaaaaataaagactggtcacgggtaaaatttggcgctggtcgctatcgtctcttctttcgttacagtgaaaaagagaaagtcatcattctgggatggatgaacgatgaaaacacgctgcgcacctacggtaaaaaaacagatgcctataccgtattcagtaaaatgttaaaaagaggacatcctcctgccgactgggaaagcctcacccaagagacagaagaaagccattgatggtgttcacaatgcccgccgaacgcattggtgttgaccagcgggcatcctttctcattccccgaccagaatcacttcaaccccagcctttctcagtccttccagactatccgcaggaatgccttcatcaacaatgatcatgtcgatacgttgagtatcaatgatcttatgtaaactagaacgattgaacttactggaatcggtgaccacgatgatccgttccgcaacttcgcacatccgacggtttaaacgggcttcatcttcattatgcgtgctgacgccgcgctccagatcgatcgcatctacaccaagaaacagcatatcgaagtggtaattttgcagcgattgctcagcctgatcaccgtaaaaagattgcgactgacggcgcaaatgccccccggtcatcagcagctcaacgccttccgcttccagcaacgcattagccacgttcataccgttggtcatcgcaattacgtcagtgtgcttgcgcatcagacgagcaatctcaaaagtggtggtcccggagtcgaggatcacccgatgaccaggctgaatcaactcaacggcagctttcgcaacgctgcgtttcatcgcggtgttcagcgcgcttttatcttccactgatggctcgactgacggcgttgtgctatcgcagatcaacgcgccaccataggcacgcacagcgatcccctgcttttccagaaacgccagatcgttgcggatcgtcacagtagatacaccatacaacgccgatagatcattaacttgcacacttccttgctggcgcaggcgttgaatgatctgttctcgtcgctcgctggtgcctgtcactcgcttctcacctgaagcgtcggtattactcatagtaagtcctttcgtaaaactttcgtttcatttcgttttgcctattaacgcctttctattaagcaaatgcaagcccaccttacccattggcgcaagctactctcgtttcagtggctttcattatgtttcttttgtgaatcagatcagaaaaccattatctttcgttttatttttatctcaccatgacgcagtatcaactgaaacaaaacgaaagattaatgtcgcagtaatctgaactggagaggaaagtgaaacatctgacagaaatggtgagacagcacaaagcgggcaaaacaaatgggatttacgccgtttgttccgcacatccgctggtgctggaagctgcaatccgctacgccagtgcaaaccaaacgccgttactgattgaagcaacctccaatcaggtggaccagttcggcggttataccggaatgacgcccgccgattttcgcggctttgtttgtcagctcgccgactcgttgaatttcccgcaggatgcgctgattctgggtggtgaccatctggggccaaaccgctggcaaaacctgcctgccgctcaggcaatggccaatgccgatgatttgattaaaagctacgtggcggcaggattcaaaaaaattcaccttgattgcagcatgtcctgtcaggacgatccgattcccttaactgatgacatcgtggctgaacgcgccgcccgtctggcgaaagtggcggaagaaacctgtcttgaacactttggcgaagccgatctggagtatgtcattggtcacatccgacggtttaaacgggcttcatcttcattatgcgtgctgacgccgcgctccagatcgatcgcatctacaccaagaaacagcatatcgaagtggtaattttgcagcgattgctcagcctgatcaccgtaaaaagattgcgactgacggcgcaaatgccccccggtcatcagcagctcaacgccttccgcttccagcaacgcattagccacgttcataccgttggtcatcgcaattacgtcagtgtgcttgcgcatcagacgagcaatctcaaaagtggtggtcccggagtcgaggatcacccgatgaccaggctgaatcaactcaacggcagctttcgcaacgctgcgtttcatcgcggtgttcagcgcgcttttatcttccactgatggctcgactgacggcgttgtgctatcgcagatcaacgcgccaccataggcacgcacagcgatcccctgcttttccagaaacgccagatcgttgcggatcgtcacagtagatacaccatacaacgccgatagatcattaacttgcacacttccttgctggcgcaggcgttgaatgatctgttctcgtcgctcgctggtgcctgtcactcgcttctcacctgaagcgtcggtattactcatagtaagtcctttcgtaaaactttcgtttcatttcgttttgcctattaacgcctttctattaagcaaatgcaagcccaccttacccattggcgcaagctactctcgtttcagtggctttcattatgtttcttttgtgaatcagatcagaaaaccattatctttcgttttatttttatctcaccatgacgcagtatcaactgaaacaaaacgaaagattaatgtcgcagtaatctgaactggagaggaaagtgaaacatctgacagaaatggtgagacagcacaaagcgggcaaaacaaatgggatttacgccgtttgttccgcacatccgctggtgctggaagctgcaatccgctacgccagtgcaaaccaaacgccgttactgattgaagcaacctccaatcaggtggaccagttcggcggttataccggaatgacgcccgccgattttcgcggctttgtttgtcagctcgccgactcgttgaatttcccgcaggatgcgctgattctgggtggtgaccatctggggccaaaccgctggcaaaacctgcctgccgctcaggcaatggccaatgccgatgatttgattaaaagctacgtggcggcaggattcaaaaaaattcaccttgattgcagcatgtcctgtcaggacgatccgattcccttaactgatgacatcgtggctgaacgcgccgcccgtctggcgaaagtggcggaagaaacctgtcttgaacactttggcgaagccgatctggagtatgtcattggtaccgaagtcccggtgcctggcggcgcgcatgaaaccttaagcgagctggcggtcaccacgccggatgccgcccgcgccacgctggaagcccatcgtcacgcttttgaaaagcagggtctgaatgccatctggccacgcatcattgccctggtggttcaacccggcgtcgaattcgatcacaccaacgttattgattatcagcccgccaaagcgaccgccttaagccagatggtcgaaaactacgaaacgctgattttcgaagcgcactctaccgattatcaaacaccgcaatcgctgcgccagctggtgattgaccactttgccattctgaaagttggcccggcgctgacctttgctctgcgtgaagctctgttctctctggcggcgattgaagaagaactggtgccagcaaaagcctgttctggtctgcgtcaggtgctggaaaacgtgatgctcgaccgcccggaatactggcaaagccactaccacggtgacggcaacgcgcgtcgtctggcgcgtggttatagctactcggatcgcgtgcgctattactggccggacagccagattgatgacgctttcgctcatctggttcgtaatctggcggattcaccaattccgctgccgctgatcagtcagtatctgccgctgcagtacgtgaaagttcgctccggcgagctgcagccaacgccacgggaactcattatcaaccatattcaggacatcctggcgcagtaccacacagcctgtgaaggccaataagcaaaacaaagaggaacacgctatgccaaatattgttttaagtcggattgatgaacgcttgattcacggtcaggtcggcgttcagtgggtcggatttgcgggggcaaatctggtgctggtagccaacgacgaggttgccgaagatccggtacaacaaaacctgatggaaatggtactggcagaagggatcgccgtacgtttctggacgctgcaaaaagtcatcgacaacattcatcgcgccgccgatcgacagaaaatcctgctggtttgtaaaacaccggccgatttcctgacgctggtgaaaggtggcgttccggtgaatcgcattaacgttggcaatatgcactacgccaatggcaagcaacaaatcgccaaaacggtttctgtggatgcgggtgatatcgcagcatttaacgacctgaaagccgctggggtggaatgcttcgttcagggcgtcccaacagagcctgctgtggacctctttaaattactttgagggattcatcatggaaatcagtctgttgcaggcatttgcgttgggcattatcgcctttatcgctggcctggatatgtttaacggcttaacccatatgcaccgcccggtggttctcggcccgttggtcgggctggtacttggcgatctgcataccggtattttaaccggcggtacgctggaactggtgtggatggggctggcccctctggcgggcgcacagccgcctaacgtgattatcggtactatcgtcggcacggcgtttgccattactactggcgtgaaacccgatgtcgcggtcggtgtcgccgtacctttcgctgtcgcagtacagatggggattaccttcctgttctcggtgatgtctggcgtgatgtcccgctgcgaccggatggcggagaacgccgatacacgcggcattgaacgcgtgaactatctggcattgctggcactcggcactttctattttctctgcgctttcctgcctatctacttcggcgcagaacatgccaaaaccatcattgatgtcctgccgcaacgattaatcgacggcctcggcgtcgcgggcggcatcatgccagcaatcggttttgccgtgctgctgaaaatcatgatgaaaaacgtctacatcccctacttcatcctgggctttgttgccgcggcctggctcaagttaccggtgctggctattgctgccgccgcgctggcgatggcgctgatcgacctgctgcgtaaatctcctgaaccgactcaacctgcggcacagaaagaggaatttgaagatggcatctaatcaaaccaccctgccgaacgtcagtgaaaacgaagaaacactgctgactggcgtcaatgaaaacgtgtatgaagatcagagcattggcgcagagctgacgaaaaaagatatcaaccgcgtcgcctggcgttccatgctgttacaggcttctttcaactacgaacgtatgcaggcttccggctggctgtacggcctgctgccagcactgaaaaagatccacactaataaacgcgacctggcgcgcgccatgaaggggcatatgggtttcttcaatacccatccgtttctggtgacgtttgttatcggcattatccttgcgatggagcgttctaagcaggacgttaacagtattcagagcaccaaaattgccgtcggtgcgccgctcggcgggattggcgatgcgatgttctggctaacgctactgccgatttgtggcgggataggtgcaagcctcgcgctacaaggctctattcttggcgctgtcgtctttattgtgctgttcaacgtggtgcacctggggctgcgttttggtctggcgcattatgcttaccgcatgggcgtggcggcgattccactcattaaagcaaataccaaaaaagtcggccatgcggcatctatcgttgggatgacggtaatcggcgcgctggtggcaacctatgttcgtttaagcaccacgctggaaatcaccgcgggcgacgcagtggttaagttacaggctgatgttatcgacaaactgatgccagccttcttaccgctggtctacaccctgaccatgttctggctggtacgccgcggctggagtccgctgcgcctgattgcgattaccgtggttctcggcatcgtcggtaaattctgccatttcctttaaatacaatgaggtattagatgttaagtattattttgacagggcatggcggatttgccagcggcatggaaaaagcaatgaagcaaattctcggtgagcaatcgcagtttatcgccatcgattttccggaaacctcaagcaccgcgctgcttacatcgcagcttgaagaggccatcgcccaactggattgtgaagacggcattgtttttctgacggatttgctgggcggcacgccgtttcgcgtagcttcaacgctggcgatgcaaaaaccgggctgtgaagtgatcaccggcaccaatttgcaactgctactggaaatggtgctggagcgcgaagggttaagcggtgaagagttccgtgtgcaggcgctggagtgtggacaccgtgggctgaccagtctggtggacgagttaggccgctgccatgaagaatgtccggtcgaggaaggaatatgacacacgttctgcgcgccagaaggctgctgactgaagagggatggctcgatgaccatcagttgcgtattgctgacggtgtaatcgcagcaatcgaaccgattccagtgggcgtgactgaacgcgatgcggaactgctctgtcccgcttacatcgacacccatgtacacggtggtgcgggcgttgatgtaatggatgacgcgccggatgtgctcgacaagctggcaatgcacaaagcacgcgaaggtgtcggcagttggttaccgaccaccgtaaccgcgccgcttaataccattcatgcggcgctggaacgtattgctcaacgttgccaacgcggcggacctggtgcgcaagtgctggggagttatctcgaaggaccgtacttcacgccgcagaataaaggcgcgcatccaccggagctgttccgcgagctggaaattgccgagctggatcaattgattgccgtttctcagcataccttgcgcgtggtggcgctggcaccggaaaaagaaggggcattgcaggccatccgccatcttaaacagcaaaacgtacgggtgatgctggggcatagcgcggcgacctggcaacaaacccgtgccgcgtttgatgctggtgccgacggcctggtgcattgctataacgggatgacaggtttacatcaccgcgaaccgggaatggttggcgcgggattaacagacaagcgcgcctggctggaactgatagccgatggtcatcatgtacatccggcggcaatgtcgctctgttgttgctgtgcgaaagagaggatcgtactgatcaccgacgcgatgcaggcagccgggatgccggatggtcactatacgttatgtggtgaagaagtgcagatgcgcggtggcgttgtccgtaccgcgtccggtgggctggcgggcagtacgctgtctgtcgatgcggcagtgcgcaacatggtcgagttgacgggcgtaacgcctgcggaagccatccatatggcgtcgctgcatccggcgcgaatgctgggtgttgatggtgttctgggatcgcttaaaccgggcaaacgcgccagcgtcgttgcgctggatagcgggctgcatgtgcaacaaatctggattcagggtcaattagcttcgttttgatggtttgctcctttattaggccttcacttcccccgtaaggccttctttttctttcgttttgatctgtgcagcggtgtcggatgcgacgctaatgcgtcttatccgacctacggttggtgaccgtaaggccggataaagtatttacgccgcatccagcaatcccttttacttcccttgccttttctttcaacgatcacagatttcgttttatttcctttttcttcattgaactttcagtttcttttctataaattttaaccaacgaaagaaatcaccaagtgaaatgaaacgaaaggcaagcgaaagcgacaacgccgacgtcaagttcatcagactaaggattgagttatgccagaaaattacacccctgctgctgccgcaaccggtacatggactgaagaagagatccgccatcagcctcgcgcatggatccgttcactcaccaacatcgacgcgctacgttccgcgctcaataacttccttgaaccgttactgcgcaaagagaatctgcggatcatcctgaccggagccggaacctcggcatttatcggtgacatcatcgcgccgtggctcgccagccataccggtaaaaacttcagcgccgtaccgaccaccgatctggtcactaatccgatggactacctgaatccagctcatccgctgctgttgatctccttcggtcgatccggcaacagcccggaaagcgtcgccgccgtggaactggcaaatcaatttgtaccagaatgctatcacctgccgatcacctgcaacgaagcgggcgctctttaccaaaacgcgatcaacagcgacaacgcgtttgccctgctgatgcccgcagaaacgcacgatcgcggcttcgcgatgaccagcagcattaccaccatgatggccagctgcctcgcggttttcgcacctgagacgatcaacagccaaaccttccgcgatgtggcggatcgttgccaggcgatcctgacctcactgggcgatttcagcgaaggtgtgtttggttacgcaccgtggaaacggatcgtttatctcggcagcggtggcttacagggcgcagcacgcgagtcggcgctgaaagtgctggaactgacagcgggtaaactggcggccttctatgattccccgaccggattccgtcatggcccgaaatcgctggtcgataacgaaacgctggtggtggtgtttgtctccagccacccttacacccgtcagtatgatcttgatctgctggcagaactccgccgcgataaccaggcaatgcgcgtaatcgccatcgccgcggaaagcaacgacgttattgccgccggtccacatatcatcctgccgccgtcccgtcactttatcgacgttgagcaggcattttgcttcctgatgtacgcccagacatttgcactgatgcagtcgctgcacatgggtaatacgccggataccccatcagccagtggcaccgttaaccgcgtggtgcaaggcgtaatcattcatccgtggcaggcataagaggatcgcattatgagcattatctccaccaaatatctgttacaggacgcccaggccaatggctacgcggtgcctgcctttaacattcataacgccgagacgatccaggcgatcctcgaagtgtgcagtgaaatgcgatcgccggtgatcctcgccgggacgccggggacctttaagcatatcgcgctggaagagatctacgccctgtgtagcgcctattccacgacctataacatgccgctggcactgcatcttgatcaccacgaatcgctggatgatattcgccgtaaagtccacgcaggcgtgcgcagcgcgatgatcgacggcagtcatttcccgtttgccgagaacgtgaagctggtgaaatcggttgtcgacttctgccactcccaggattgcagcgtggaagcagaactgggccgcctcggcggtgttgaagatgacatgagcgttgacgccgaaagtgcattcctgaccgatccacaagaagctaaacgctttgtcgaactgactggcgtcgacagcctggcggtagcgattggtacggcgcacggcttatacagcaaaacgccgaagattgatttccagcggctggcggaaattcgtgaagtggtggatgttcctctggtgctgcatggtgccagcgatgtcccggatgaatttgtccgtcgcactattgaacttggcgtaacaaaagtgaacgttgccacagaattaaaaatagccttcgctggcgcggttaaagcctggtttgcggaaaatcctcagggtaatgatcctcgttattatatgcgcgtcggaatggatgcgatgaaagaagttgtcagaaataaaattaatgtctgtggttcagcgaatcgaatttcagcataatcattagttttttatgatttatcccaatgtacttcccgattaatatcggggagtgccttaatggtaaaggagataactaaaccttaataaatacatcagtacaatatcgcaacaataatatatttaaaaagattatattattcaactttatggtgaggattacacaatgagcagtccaaatattctcttaacccgtattgataaccgtctggttcacggtcaggttggcgtgacctggacatccaccatcggtgcgaatctgttggtagtcgtggatgatgttgtcgctaacgatgatattcaacagaaattaatgggtattaccgcagaaacctacggctttggcattcgtttctttactatcgaaaaaaccattaacgtcatcggcaaagctgcaccacatcagaagatcttcctgatttgccgtacgccacaaacggtacgtaaattggtagaaggtggtattgacctgaaagatgtcaacgtcggcaatatgcatttctcggaagggaaaaagcaaatcagcagtaaagtttatgtcgatgaccaggatctcacggacttacgttttattaaacaacgtggcgtgaatgttttcattcaggacgtccctggcgatcaaaaagaacaaatccctgactaaatctaaaatcgccttaatattggtttgaggtaataaaaatgcatgaaataaccctactccagggattatccctggcggcgttagttttctttctggggattgatttttggctggaagccttatttttattccgcccgataatcgtttgtacccttacaggtgctattctcggtgatattcagactggcttaattaccggtggcctgacagagttggctttcgccggattaacccctgcaggtggtgttcagccgcccaaccctattatggcgggtctgatgaccactgtcattgcatggtctacgggcgttgatgccaaaacggcaattggtcttggcctgccgtttagtttgttaatgcagtacgtcattctgttcttctattccgctttctcattatttatgaccaaagccgataaatgcgcaaaagaggcggatacggcagcattttcccgacttaactggacaacgatgctcatcgtcgcttcagcgtatgcggtgattgctttcctctgtacttacctggcacaaggggcgatgcaggcgctggtgaaagcgatgcccgcctggctgacccacggctttgaagtggctggcggtattctgcctgccgttggttttggcttgctgctgcgcgtgatgttcaaagcgcaatatatcccttacctgatcgccgatttcctgttcgtttgctacatccaggtcagcaacctgttgccggttgccgtactgggcgcaggctttgcggtgtatgagtttttcaatgcgaaatcccggcagcaagcgcaaccgcagcccgttgccagtaaaaatgaagaagaggactacagcaatgggatctgaaatcagtaaaaaagatatcacccgtctgggctttcgttcgtcactgctacaagcaagctttaactacgaaaggatgcaggcgggcggttttacctgggcgatgttgccgatcctgaaaaagatttataaggacgacaaaccgggcctaagcgcggcgatgaaagataacctcgaatttattaatacccaccctaatctggtcggattcctgatggggttattaatttcgatggaagaaaaaggagaaaaccgcgacaccattaaaggcctcaaagtggcgctgtttggcccaatcgccgggattggcgatgcgattttctggtttaccttgttgccaattatggcggggatttgctcatcgtttgccagtcaggggaacctgttgggaccgattttgtttttcgccgtttacctgcttatctttttcctgcgcgtcggctggacccacgtcggttattcagtcggcgtgaaggctatcgataaagtgcgagagaactcgcagatgattgctcgttcggcaaccatcctcgggatcacagtaatcggcgggctgatcgcttcgtatgtgcatattaacgtggtgacgtcgtttgccatcgacagtacccacagcgtcgcactgcaacaggatttcttcgataaagtcttcccgaatattttaccgatggcctacaccctgctgatgtattacttcctgcgggtgaaaaaagcgcatccggtgctgttaatcggcgtgacgtttgttctttctattgtttgttctgcattcggcattttgtaaatggaacgaggcaccgcgtctggcggtgcctctttacttaaggaatttcatcctgtgcaaccccttcaacaagttgaaaactatacggcattaagtgaacgtgccagcgaatatttattggccgtgatccgtcgcaaaccggatgccgtgatttgcctggcgaccggagccacgccattactgacgtatcattatctggtagaaaaaatccaccagcagcaggttgatgtcagccatctcaccttcgtgaagctcgacgaatgggtggatctgccattaacgatgcctggcacctgcgaaactttcctacaacagcatatcgtgcagccgctggggctgcgtgaagaccagctcatcagctttcgctccgaagagataaatgagacagagtgcgaacgggtaacgaacctgattgcgcgcaaaggcggtctggatttatgcgttctcggattggggaaaaacggtcatcttgggctgaacgaaccgggagaaagcctgcaaccagcctgccatatcagtcaacttgatgccagaacacagcaacatgagatgttaaaaaccgcggaccgtcccgtgactcgtgggatcaccttaggcctgaaggatattctcaatgcccgcgaagttttgttactggtgactggcgaaggaaaacaggatgcgacagaacgttttctcacggctaaagtctccaccgctatcccggcttcatttttatggctgcataaccatttcacatgcgtgattgatgaaatgtgtcgtcgttaactcgccaggtaaaggcgttgtagcgctattcctgctgcgacgcctgtaatcactctccctgctgctccagcgcatacttatacagcgcatttttcttcacgccgtgaatttctgcggccagcgccgccgcttttttcagcggcagttctgcctgtagcagcgccagcgtgcgcagggcatcagcaggcaagtcattttcctgcgctttatggccttcgacaatcagcaccatttcgcctttgcgacggttttcatcttcttttacccacgccagcagctcgccaacgggcgcgccgtgaatggtttcccaggttttggttagctcacgcgccagaaccacgtaacgggattcgcctaataccgcaacgatatcttccaggctatctaacagacggtgggtagattcataaaaaatcagcgtgcgcggctccgcttcaatagcttttagcgcatcacggcggccttttgatttggcaggtaaaaagccttcataacaaaaacgatcggatggtaaacccgcggcgcttaacgcagtgatagcagcacacggccctggtagcggcaccacgcgaatccccgcttcacgacaggtacgcaccagatggtagccaggatcgttaattagcggcgttccggcatcggaaaccagcgcaatgttttgcccctcttgcagcttcgccagcagcgtttcggctttttgttgttcattatggtcgtgcagcgcaaacaaccgggcattaatcccaaaatgttgcagcaataaaccggtgtgacgcgtatcctcggcggcaatcagatcaacggcctgtaatacctccaacgcacgctgggtgatatccgccagattgccgattggcgtcggtacaatgtaaagctgcccctgagaattatccgccgattggtgttgtttcattgtgtcgtccgtattgccgatttaatattgagcattgcgtaaaaaaaaatatcactggatacattatggtaccctcaacattttctcgtttgaaagccgcgcgttgtctgcctgttgttctggcagccctgattttcgccggttgtggcacccatactcccgatcagtccactgcttatatgcagggcacggcgcaggctgattctgccttttacctgcaacagatgcagcaaagttctgatgataccaggatcaactggcaattactcgccattcgtgcactggtgaaagaaggtaaaaccgggcaggcggttgagttgtttaaccaactaccgcaagaactgaatgatactcagcgtcgcgagaaaacactgctggcggcagagataaaactggcgcagaaagattttgctggcgcgcaaaacttgctggcgaaaatcacacctgccgatttagaacaaaaccagcaagcccgttactggcaggcaaaaatcgatgccagccaggggcgtccttccattgatttactgcgcgcgttaattgctcaggaaccgctgctcggtgcgaaagaaaagcagcagaatattgacgccacatggcaggcgctctcctccatgactcaggagcaggcgaatacgctggtgatcaacgccgacgaaaatattctgcaaggctggctggatttgcagcgcgtctggtttgataaccgtaacgatcctgacatgatgaaagctgggatcgccgactggcagaaacgttatccgaacaacccgggcgcgaaaatgctgccaacgcagttggttaacgtaaaagcgtttaaaccagcatcgaccaacaaaatcgccctgctgttgccgctgaatggccaggcagcggtatttggtcgcactattcagcaaggctttgaagcggcgaaaaatatcggcactcagccagtggtggcccaggtagcagccgcacctgccgcagacgtagcagaacaacctcagccgcaaaccgtggatggcgttgccagcccggcacaagcttcggttagcgatctgaccggtgaacagcctgcggcccagtcggtgcctgtaagcgccccggcgacaagcaccgcagcggtaagcgcacccgcaaatccatccgcagagctgaaaatctacgatacctcatcacaaccacttagccagatcttaagccaggttcagcaggatggcgcgagtattgtggtcggtccgttgctgaaaaataacgttgaagagttgctgaagagcaacactccgctgaacgtgctggcactgaaccagccggagaacatcgaaaaccgcgtcaatatttgttacttcgcgctttcaccggaagacgaagcgcgcgatgcagcgcgtcatattcgtgaccagggtaaacaagcgccgctggtgctgatcccacgcagttcattgggcgatcgcgtagccaatgcgtttgcgcaagagtggcagaaactgggcggcggcaccgttctgcaacaaaaatttggttccaccagcgagttacgcgcgggtgttaacggcggttcgggtatcgctttaacgggtagcccgattactcccagagaaacaaccgactccggcatgacgaccaacaatccaacgctgcaaaccacaccaaccgatgatcagttcaccaataatggcggtcgtgtcgatgcggtgtacattgtggcaacgccgggtgaaatcgcttttatcaaaccaatgatcgccatgcgtaacggtagccagagcggtgcaacgctgtacgccagctcccgcagtgcgcaagggaccgctggcccggatttccgcctggagatggaaggcttgcagtacagcgaaatcccgatgctggcaggcggtaatctgccgttaatgcagcaggcgctcagcgcggtgaacaacgattattcgctggctcgcatgtatgcgatgggcgtcgatgcctggtcgttggcaaatcatttctcacaaatgcgccaggttcagggttttgaaatcaacggtaataccggaagcctgacggcaaacccggattgcgtgattaacaggaagttatcatggctacagtaccaacaaggtcaggtagtccccgccagttaaccaccaaacagaccggcgatgcgtgggaagcacaagcgcgtcgctggctggaaggcaaaggactacggtttatcgccgctaacgtgaacgagcgtggcggcgagatcgatctgataatgcgtgaaggccggaccaccgtttttatcgaggtgcgttaccgccgctctgcgctttatggcggcgcggcagccagtgtgacccgcagcaaacaacacaaattattacagactgcccgcttgtggctcgcgcgtcataatgggagttttgatactgtggattgccggttcgatgtggtagccttcaccgggaatgaggttgagtggattaaggatgcctttaatgaccactcataattaaggtttaaggattagcgtgcaagaaagaattaaagcttgcttcactgaaagcattcaaactcaaattgcggcggcagaggcgcttccggatgccatctcccgtgcagccatgacgctggttcagtctctgctcaatggcaacaaaatcctctgttgtggtaatggaacttccgctgccaatgcacagcattttgctgccagcatgatcaaccgtttcgaaacggagcggcccagcttacctgccattgcactaaatactgataatgttgtcttaacggcaattgccaacgatcgcttacatgatgaagtgtatgcaaaacaggtgcgggcgctgggccatgcgggagatgtattgttagccatttccacccgtggcaacagccgcgatattgtaaaagcggtagaagctgccgttacgcgtgatatgaccattgtggcattaaccggctatgacggcggtgaacttgcaggtttgttagggccacaggatgtggagatccgcattccttcgcatcgtagtgctcgcattcaggaaatgcatatgctgacggtaaattgcctgtgcgatctgatcgataacacgcttttccctcaccaggatgtttaaggagaatacatgaaggcattatcgccaatcgcagtccttatttccgcgctgctgttgcaaggttgtgttgccgctgccgtagtgggtactgctgctgtgggtaccaaagccgcaactgacccacgcagtgtcggcacccaggtagacgatggtaccctggaagtgcgcgtgaacagcgcattgtcgaaagacgaacaaattaagaaagaagcgcgcattaatgtaacggcctatcagggcaaagtgctgctggttgggcagtcaccaaacgctgaactttcggctcgcgccaaacagattgctatgggcgtagacggtgccaacgaagtgtataacgagattcgtcagggccagccgattggtctgggcgaagcgtctaacgatacgtggatcaccaccaaagtacgttcgcagctgttaaccagcgacctggtgaaatcgtccaacgtgaaagtgaccaccgaaaacggtgaagtgttcctgatggggctggtgactgaacgtgaagcgaaagcggcggcagatattgccagccgggtaagcggcgtgaagcgggtaactacggcgtttacgtttattaaatagcagcccttgtaatgcctgatgcgacgcttgcagcgtcttatcaggcctacaacgatgcaaaccgtaggtcggataaggcgtttacgccgcatccgacatgttttccctcaaatcaaaccaacagcgccagcccgccgacaatcacaccagacactgccaccatcgcccccgtcagccataaggctttcgccggaaacgctttacgcaacataatcagtgacggcaaactcaccgccgggagcgtcatcaacaatgccagcgccggagcggttcccatacctgccagcatcatcgtttgtacaatcggaatttctgctgccgtgggaatgacaaacaagcatcccgctaccgccatcgccaccacccacatcaggctgttatcgacagcaccatcggcatgggggaataaccagacgcgagcggcacccaacaccagtactgcaaggatgtaaaccgggatcgtactccagaaaagcgtccatagcgccctgccccagcggctaaaaaaaccgccctgtgattccggtatgtcaatttcgaccggtgcctgcgtttgcggtgtttcacgcacccatttttgcaccagcgtcgcaatcagcaacaccatcaccagccccgccaccagacgaatcgccgcaaaaccccagccgaggacgaaccccataaacaccagcgtcgccgggtttaacaacggattccccatccagaatgccagcgcaccgcccatcgacacctgttggcgacgcattcccgccgcgaccggagccgcacagcaggtacacatcatgcccggcagagaaaacagcgttcccagcaacgtgccgcgaaagcgcgattgcccaagcgtacgcaacaaccagtcacgcgggatcagcacctgaatcaacgaaccgaggatcacccccagcaccgccgctttccataccgcgagaaaatagatcatcgcgtaatccaacgccgcctgccacggattagcatctgcctgcgcaaggatagatttaccgatactgtgggtttcggcagcagtaaacgctttgccgtagtaaggttgccatttcacataccagagaccggcaatgacaacgagaaagaaaagcgcgggtttccaccactgaatgggcgttgccgcctgagatgaagactgaccagtcatagcattccccaggaataagttatgataattgagcgcgtgaatattacgctcactatcatttcttgggaataattattcagctcttttgcgtaattctgaagagctcaaaatcgtcacgccttcatgctcaggccgcatcgcctctgccaacatgacccgcgccacgtctcgtgcatcaatggatttccagttacccggtagcaaacgaaaaagcggcgcaaaaagcgtttcattcattcgctgtttgcttcggtcacccagcagcattgacggacgagcaatggtcaatttcggccagttctgggcgattaatgcttcttccatctcccctttgacgcggttatagaaaaacggcgagtgggcattagcacccatagcactgaccaccagcatatgctgcgcaccgagccgccgcccggttaatgcggtatccaccaccaacgtgtaatcggcatgaataaacgcctctttgctccccgcttctcgccgcgtggtgccgagacaacaaaacacaatgtcgatgggatcggtgacctgcgccagcgcgtcagtcagttgcggatcatggggattaaacaccccgggcatatcgcccaacggacgtcgcgtcggcgcagcaatggcgttaactttcggttcattaatcaacatccgcagcaggtgaccgcccaccagccccgttgcgcctgtaattaaaacctggctcatattgcctccccccggtatgtgtactcatgtttaactataggttaccgttgccagaccagttttttaccaaagcccagcgtgttgtcggtgaatttgatttcatcgagccggatttcccataccggggccgacagcattctggcaaccggaaagcgacgattgtacgccttgcgtgcgaggtcgctttcctcgccttccagtctgcggatctcacctttaaactgcacgccgcgaattaacgctaccgttttcggctgaccgtttaccgttccggcaattgccgcctgcggcccgctcatctgcgcatgacgcgttttttcttccgtcaaaatgtagaaggcgactttctgcgcatcaaaaagataaaaggcattggcgcaccacagttccccttcctgctgcacacaccaggtgacaacatgttgttttgccagccaacggctgatggcggtgagtgtttccattgctgttctcttttatactgtgggcctgaccttaacatgcgacgcagacgatgacaccctggtttctttacttgatccgtaccgccgacaataagctttataccgggatcaccacggatgtcgaacgccgctatcagcagcaccaaagcggcaaaggggcgaaagcactgcgcgggaagggagaactaacgctggcgttttccgcaccagtgggcgatcgttcgctggcgttacgggcagaatatcgcgttaagcaactgaccaaacggcaaaaagagcgtctggtagcggaaggtgcagtgtttgcagaactgttgagcagcctgcaaaccccggagattaaaagcgattgaagtgctcgtgatactcaaccagaccagttacaccgttcagcgcgtcatccgctaaacgatgtacctggaaggcactttcagtgcccggccagcggcaacgcagatcgtgatgtgccgccagttcaaagccgaaacggctgtacagcgccggatcgcccagcgtcaccactgcggcatagccgaactcattaagcgaatcgagtccttcatagaccagttggcgtgccagcccctgtccacggtatttttcatctaccgccagcggtgccatgccgacccattgcaggtcttcgccctgcacatcaaccggactaaatgccacatagccaatgacctgaccttcgtcatctgtcgccaccagccccagcgtcagaaagccatcttcacgcagatcgtgaaccagcttcgcttccgcatcactttcgaatgaacgacgcagcagggcatcaatacccggcgcatcaatgggaatttctactcgaattagcatggttcacctaccgatgtctgtttggtttcaggcgcggttttcattcccgcctcaacaaaatccgccagttgcagcagcatcatgcgtaaggctttcggcatttgctccagttcaatggcgtccatcaggtttttcacatacagccccagctccgtatcgccttcaatcaccagccgacgctggaagaagagcgtatccggatcttgtttacgcgccgcaatcatcagcagatcgctggcgtcggcactaaaactcacatcagcttgcgcgttctggctaacgaccagtttgccattcaccaccgaggtaaaccattgcaggtcaatatcacgcacatgaatacttaaccagcgaccttcaagaaactccagctcgccatcatccagcgcctgacggaattgccagcttaagacctgctcaagaacctggcgttttagcgcaaatggcgtcagttttaccggtacactcaacagagatggccccaaatgcacaatacgggaacgcagtttatccaacacgagttttactccctgtttcaacaatcatcctattttgccatatcagaaaaataacatagcggtataaatcaacaattccatatgaaattgctgctaccaccaatacaactttaactgccttaaatcaaaaattgtcgcagcaaggttaactaaaatcccagttcgttaacatttttgcgttttgatagcgcaaccttcaggaaaaattatggagctgctctgccctgccggaaatctcccggcgcttaaggcggccatcgaaaacggcgcagatgctgtttatatcgggctaaaagatgataccaatgcccgtcacttcgccggccttaactttaccgagaaaaaattgcaggaagcggtgagttttgtccatcaacatcgccgcaaacttcacatcgcgattaacacttttgcgcatccggacggttacgcccgttggcagcgcgccgtggatatggcggcgcaactgggtgccgacgcgctgatactcgccgacctcgccatgctggagtacgccgccgagcgttatccgcatattgagcgccacgtatcggtgcaggcttcggcgaccaatgaagaggcgattaacttttatcatcgccattttgacgttgcccgcgtggtgctgccgcgcgtgttgtcgattcatcaggtgaaacaactggcacgggtcacacctgtaccactggaagtctttgctttcggcagcctgtgcattatgtcggaaggtcgttgctatctgtcgtcgtatttgacgggtgagtcgcccaacaccgtgggcgcgtgttctccggcccgtttcgtgcgctggcaacaaacgccgcaggggctggaatcccgcctgaacgaagtgctgatcgaccgttatcaggacggcgaaaacgcaggttatccgacgctatgtaaagggcgttatctggtgaacggcgagcgctatcatgcgctggaagaaccaaccagtctcaatacccttgagctactgccggagttaatggcggcgaatatcgcttcggtgaaaattgaaggccgccagcgtagccctgcgtatgtcagccaggtagcgaaagtctggcgtcaggctatcgaccgttgtaaggccgatccgcaaaacttcgtgccgcaaagcgcgtggatggagacgctcgggtcgatgtccgaaggcacgcagaccacccttggcgcatatcaccgtaaatggcagtgagaaaagcaatgaaatattccttagggccagtgctgtggtactggccaaaagagacgctggaagaattttatcagcaggccgccgccagcagcgccgacgtgatttatcttggtgaagcggtatgcagcaagcgccgggcaaccaaagttggcgactggctggagatggcaaaatcactcgccggaagtggcaagcagattgtgctctccacgctggcgctggtgcaagcatcctccgaactgggcgaactgaaacgctatgttgagaacggtgagtttctgattgaagccagcgatctcggcgtggtgaatatgtgcgctgaacgcaaactgccgttcgtcgccgggcacgcgctgaactgctacaacgcggtgacgctgaaaatattgctcaaacagggcatgatgcgctggtgtatgccggtggagctttcccgcgactggctggtgaatctgcttaatcagtgcgatgagctgggcattcgtaaccagtttgaagtggaagtcttgagctacggtcatctgccgctggcctactctgctcgctgctttaccgcgcgttcggaagaccgcccgaaagatgagtgtgaaacctgctgcattaagtatccgaacgggcgcaacgtgctgtcgcaggaaaaccaacaagtgtttgtgctcaatggcattcagaccatgagcggctacgtgtacaacctcggtaacgagctggcatccatgcaggggctggttgatgtggtccgcctgtcaccgcagggtactgacactttcgcgatgctcgacgccttccgcgctaatgaaaatggcgctgcaccactcccgttgacggcaaacagcgactgtaacggctactggcgacggctggctgggctggaactgcaagcctaagcaaatagctcactttgttaacaactttaactaccctttaatgcagtattaaagattaatcggtaacaaagtgagctgttatgactgataaaaccattgcgttttcactactcgatctggcccccatccccgaaggttcttcagcgcgggaagcgttctcccactctctcgatctcgcccgtctggctgaaaagcgcggctatcatcgctactggctggcggaacaccacaatatgactggcattgccagtgctgcaacatcagtattgattggctatctggcggcaaataccaccacgctgcatctggggtctggcggcgtgatgttaccaaaccactcaccgttggtgattgccgaacagttcggcacgctcaatacgctctatccggggcgaatcgatttggggctgggtcgtgcgccaggtagtgaccaacggacaatgatggcactacgtcgccatatgagcggcgatattgataatttcccccgcgatgtcgcggagctggtggactggtttgacgcccgtgatcccaatccgcatgtgcgccctgtaccgggctatggcgagaaaatccccgtgtggttattaggctccagcctttacagtgcacaactggcggcgcagcttggtctgccgtttgcgtttgcctcacacttcgcgccggatatgttgttccaggcgctgcatctttatcgcagcaacttcaaaccgtcggcacggttggagaaaccgtatgcgatggtgtgcatcaatattatcgccgccgacagcaaccgcgatgccgaattcctgtttacctcaatgcagcaagcctttgtgaagctgcgccgcggcgaaaccgggcaactgccgccaccgattcaaaatatggatcagttctggtcgccgtccgaacagtatggtgtgcagcaggcgctgagtatgtcgctggtgggcgataaagcgaaagtgcgtcatggcttgcagtcgatcctgcgcgaaaccgacgccgatgagattatggttaacgggcagattttcgaccaccaggcgcgcctgcattcgtttgaactggcgatggatgtgaaggaagaattattggggtagtgtgttttaacgtaggaagccttatccgagatggcaacgctgccctacacaatgcctgataagcgaagcgcatcaggcattgtgtaggcagcagaaatgtcggataaggcaccgctgattactgatacaccggcagcaaattaaagctcgataaaatatgcaccagtgcgttgccaacgccaaacaccagaatcagcgcaatcatcggcttgccgccccagacgcggaatttcgggctgccaaagcgtttacgcgatgcgcgggccaacagcgccggtacaattgccgcccagatagtagctgctaagccagcataaccaatggcgtacaggaatccgttaggaaacagcaggccacccacaacaggcggggcaaaggtcagcaacgctgttttcaaacggcccatagccgagtcgtcaaaaccaaacagatctgccagatagtcaaacaaacccagcgttacgccaaggaacgaactcgctaccgcaaagtttgagaacacgaccagtagaaggtccagactacggctgttcagtacgccgcttaacgcctgtaccagcacatcaatattaccgcccttctcggcgatgccgataaactccggacgcgggatgttacccatcgtcgccagcaaccagatggtatacagcgccagcgccatcagcgtaccgtacaccaggcatttcacgatggttttcggatctttgccgtaatacttcatcaggctcggtacgttaccgtgataaccaaacgatgccagacagaacggcagcgtcatcaacagatacggtgcataagacgcattgctttcggcgacgttgaacaatgtcgcaggctgcacatgccccagcaggctaccgaaggtgaggaagaaggtaatgactttcgcccccagcacaatcgctgtcatgcgactgacggctttggtgctcaaccacaccacaaacgctaccaacagtgcaaaaccaaaacccgctgcccgtgccgggacgtttagcgacatctctgcgaaggtgtgatgcagaatcgaaccgctggcagaaatataggcgtaagtcaggatatagagcacaaaggcaatggaaatgccgttgactacgttccagcctttgcccagcaaatctttggtgatggtgtcaaagctagaaccgattcgataattcaggttagcttccagaatcatcaagccggaatgcagcatacagaaccaggtaaagatcagcgccgccattgaccagaagaaccacgccccggacatgaccacaggcagagaaaacatccctgcgccaataatggtgccgccgataatcaccacgccgccaagcagcgacggtgacgtttgggtggtggttagtgttgccatgagggcttctctccagtgaaaaatagtgcgactgtgttgttatgcattgcactgtaccagtacatgagtacaaaaaacagaaaaaaagccccgatggttaaaatcggggctgtatatattattttacagattgtgttcgctgttcagcgatgattacgcatcaccaccgaaacgacgacgaccggtagagtcatcacgacgcggtgcgcggccttcacgacgttcgccgctaaaacgacgcccatcaccacgccccccttcacggcgttcaccgctgaagttacgaccgccttcacgacgttcgccaccgaaaccacgaccaccgccacgacgctcaccgccagtatgcggctgtgcatcgcccagtaactgcatgttcatcggcttgttgagaatgcgagtacgcgtaaagtgttgcagcacttcacccggcatacctttcggcagttcgatggtggagtgagaagcaaacagcttgatgttaccgatgtaacggctgctgatgtcgccttcgttagcaatcgcaccaacgatatgacgaacttcaacaccatcatcgcggcccacttcaatacggtacaactgcatatcgccaacatcacgacgttcgcgacgcggacgatcttcacggtcgccacgcgggccacggtcgttacgatcgcgcggaccacggtcatcacggtcacggaattcacgtttcggacgcatcggcgcatctggcggaacaatcagagtacgttcaccctgtgccattttcagtagtgcggctgccagagtttcgagatccagctcttcaccttcggcagtcggctgaattttgctcagcagtgcacggtattgatccagatcgctgctttccagctgctgctgtactttagcggcaaatttttccagacgacgtttgcccagcagttctgcgttcggcagttctacttccggaatggtcagcttcatggtgcgttcaatgttacgcagcagacgacgctcacggttctcaacgaacagcagtgcacgaccagcacgacctgcacgaccggtacgaccgatacggtgaacgtaagactcagaatccatcgggatatcgtagttaaccaccaggctgatacgctcaacgtccaggccacgggctgcaacgtcggtcgcaatcaggatgtccagacgaccatctttcaggcgttccagtgtctgctcacgcagcgcctggttcatgtcaccgttcagcgcggcgctgttgtagccgttacgctcaagagcttctgccacttccagagtcgcgtttttggtacgaacgaagataatcgccgcatcaaaatcttccgcttccaggaaacgtaccagtgcttcgtttttacgcataccccagacagtccagtagctctggctgatgtcaggacgggtagtcacgctggactgaatgcgcacttcctgcggctctttcataaagcggcgggtaatgcgacgaatcgcttccggcatggttgcagagaacagagcggtctgatgaccttccgggatctgcgccataatggtttcaacgtcttcgatgaagcccatgcgcagcatttcgtcagcttcatccagaaccagaccgctcagtttagagaggtccagagtgccacgtttcaggtggtccagcagacggcccggagtaccgacaacgatctgcggcccctgacgcagggcgcgtaattgcacgtcataacgttggccgccgtacagggcaaccacgtttacgccgcgcatgtgtttagagaaatccgtcattgcttcagcaacctgtaccgccagttcgcgggtcggtgccagcaccagaatctgtggtgctttcagctcaggatcaagattctgcagcagaggtagagagaatgctgcagtttttccgctccccgtctgggccatacccagaacgtcgcggccattcagcagatgtggaatacactctgcctgaattggagatggtttttcgtaacccagatcgttaagggcttcaaggataggagccttcaggcccagatctgcaaaagtggtttcgaattcagccatgtagtacgtgtgcctcaaaattaatggcggccagtctacataactcatcatgaaattgatcagcaattttcattgaaaagtgtgaaccggctcaaagtaggtgtattaacgaacaacaacgccctcacccgttaaggtgatggcaatcaaaaaagattacgggctgatgtgtacgtcagctattgctggtccgattctgccaggtcatcttggtcctggcccaggagcgataattccaacaatgcgtatcggtgctcaacaaagttatgaacgttgttggcaaccgccagtttgaacagtgccgtggcgctgtccaaatcccccagacttaggtagtacttacctaaatagaagttggtttcactgagatgctcagcgagcgaggtgttatccgttgcgtccgccttgagcctttccattaacgtttgttcgctaatgttgcccaggtagaactcgacaatgttccatccccactgttccttatccgatttttcgaagtgctgtttcaacacttctttagcctgcttctcatcgagcttctgctcggcgagataaagccacagactacggaaaggatcattgggatcgtcttgataaaacgccagcagatcatcttgcgctaacttgtcacgaccgccgtaatataatgcgatcccgcgattcaagtgcgcgtagttgtaagttggatcaagctcaagtacagaatcaaacgcttcataggcagcatcaaaattgcctgcctgcgttaaatatatgcctaagtaattgaatacttcaggcatatccggtcggattgccagcgcttgcgaaaaatcgttacgcgctaatgccctcagaccgagactatcatacaacactccgcgctcatataaaagctgtgcgcgttcgtcatcggttaaagcccgactggcaaggatctgttccatacgtgccagaatcacttcctgctgtaaagtcggttgcaatggtaccgcgaggacttcacttttacgccaggaagtattactgcatcctgcaagcgtaagtgctgtcgcaacgaaacaccagcgcaaaaaaggcttcatttcccactcccgaagaccacggttgaatgaacgtcctgttcccggttgctaacaaggcgtcctgcccggttaaaagccccccgccgcagcggagggcaaatggcaaccttactcgccctgttcagcagccggagcttccggtgctgcagcaggttgagattgctcagtcgcttctttaatgctcagacggatacggccctggcgatcaacttccagaactttcaccggtacttcctgacccatctgcaggtaatcggtcactttctcaacgcgtttatcagcgatttgagagatgtggaccagaccttctttaccgccaccaatggcaacaaatgcgccaaaatcaacgatacgggtcactttaccattgtagacgcggcccacttcgatttctgcagtgatctcttcgatacgacgaatcgcgtgtttcgctttctcgccgtcggtcgctgcaatcttcacagtaccgtcatcttcaatttcgatggtggtgccggtttcttcggtcagagcacggattacagaaccgcctttaccgataacatctttgatcttgtccgggttgatcttgatggtatggatacgcggtgcgaactcagagatatcgccacgcggcgcgttgatcgcctgttccattacccccaggatatgcagacgcgcacctttagcctggttcagtgcaacctgcatgatctctttggtgataccttcaattttgatatccatctgcaatgcagagataccgtcacgggaacccgcaactttgaagtccatatcgcccaggtgatcttcgtcgcccaaaatgtcagacagtacaacgtagttgtcgccttctttcaccagacccattgcgatacccgcaacggcagctttgattggcacacctgcgtccatcagcgccagagacgcgccgcacacggaagccatagaagaggaaccgttggattcggtaatttcagacacaacacgtacggtgtacgggaatttgtccatatccggcattactgccagcacgccgcgcttcgccagacgaccgtgaccaatttcacgacgcttcggagaaccgaccatgccggtttcgcctacggagtacggagggaagttgtagtggaacaggaaggtatcggtacgttcgcccatcagttcatcaagaacctgcgcgtcacgagcagtacccagcgttgcggtaaccagcgcctgcgtttcaccacgggtgaacagcgcagaaccgtgagtacgcggcagcacaccagtacgcacatccagaccacggatcatatctttttcacgaccgtcgatacgcggttcgcctgccagtacgcggctacgaacaacatttttctcgatagcgtgcagaatttcacccagttcgttttcgtccagggtttcgtcttcagcaagcagtgtcgcgatggtttcagatttgatgacatcaacctgcgcataacgctcttgtttgtcggtgatgcggtaagcatcgctcagacgagcttcagccagcgcagcaacgcgcgcgttcagcgcttcgtttaccggctccggctgccaatcccaacgcggtttaccggcttctttcaccagttcattgatgttctgaataacaacctgctgttgttcatgaccgaacaccactgcgcccagcatttggtcttcgctcagcagttcagcttcagattcaaccatcagcacggcagcttctgtaccggcaacaaccaggtccagtttgctctctttcagttcgtcctgagtcgggttcagtacgtactggtcattgatgtaacctacacgggcagcaccaatcgggccattgaacggaataccagacagagacagtgctgcggaagcaccaatcatcgcgacgatatccgggttaacctgcgggttaacagaaaccacggtggcgataacctgaacttcgttgacgaagccttccgggaacagcgggcgaatcgggcggtcaatcagacgcgcgatcagggtttcgccttcgcttgggcggccttcacgacggaagaagctacccgggatacgaccagcagcgtaggtacgctcctgatagttaacggtcagcgggaagaagtcctgacctggtttggcttttttctgaccaacaacggtaacaaataccgcggtgtcatccatgctaaccataacagcggcagtagcctgacgagccatcatgccggtttccagagtcacggtgtgttggccgtactggaatttacgaacgatcggattaagcaatgtaatatcctttctctttcttagacagtaccttacggtactggtgttaatacccgatcttctgcgcatcctcgcgactaatgacaaccctaacccagctctatgtgggtaaagcctctcattagccgcgcgaacctctgcaacggaagatcattcatagcaacaatacattagtttccagtgaattgctgccgtcagcttgaaaaaaggggccactcaggcccccttttctgaaactcgcaagaattagcgacgcagacccaggcgctcgatgagctgggtgtaacgtgctacgtctttacgtttcaggtagtcgagcagtttacgacgctgagaaaccatgcgcagcagaccacgacggctgtggtgatcttttttgtgctctgcaaagtggccctgcaggtggttgatctgtgcagtcagcagtgctacctgaacttcggtagaaccggtgtcgtttgcgtcacgaccaaactcagaaacgattttagctgttgcttcagtacttagagacattttaaaactccaaagtatatagaatgaaaggacgccgatctctaattcagcgatcccagtgtacgttacgcaaagtgttaaacaatttacgcgacgttaagcggcagtattctactcgtagcgacctgttatcgcaagacggttaacattacgccgggtattcaaccaccaggcgacgaggcgcaacgcggccttcatcgtcaatttcgcccataccgataaacttgccgttctcaccctctgtaacgcgaaccagtccttccagcggcgcaccggatgtacgaactgggttaccatttttgaagtaaacagaagacgttaacggaagattcaccaccgggtagtccgaagctggactgtccattggcatcagtaatggatcaagtaactccgcagccggaatatcctgctgttcggcttgctcaaccagttcacgcagatgttccagggtcaccatccgttcaaccggatatttacttaccgccagacgacgcaagtaaataacatgcgcgccacaaccgagtttttcgccgagatcgtcaatgatagtgcggatataagtgccttttgagcagtgaatttccagctccagctcattgccttcatggcgaataaacagcaattcataaacggtaatcgggcgcgcttcacgtggaacttcaatgccctgacgcgcgtattcgtacagttttttgccctgatatttcagtgctgaatacatcgaagggatctgttcgatatcgccacggaaggtatccagcgccgccgccagttgctctgcactaaaggttaccggacgttcttcaacgatttgtccgtcggcatcagaagtatcggtacgctgcccaagacgcgcaatgacccgatagcgtttgtcggagtccagcagatactgggaaaacttcgtcgcttccccgaggcaaattggcaacatgccggtcgccagcgggtccagcgcaccggtatgcccggcacggttggcgttataaatccgtttcactttttgcagcgcatcgttgctggacatcccctgcggtttatccagcaacaaaacgccgttaatgtcgcgaccgcgacgacgaggacgactcattagtcctccttgctgtcgtccgggttaacacgacgttcttcgtcatgtttgaccacgctggtcaccaggtttgacatgcgcatcccttcaaccagagagttgtcgtagaagaaggtcagttccggcacgatacgcaggcgcatcgctttccccagcaggctgcggatgaaaccagaagcttcctgcaacgctttgatgcccgctttaaccgcgtcttcatctttgtcgttgaggaacgtcacatatactttggcatacgccaggtcgcgagacatttcgacaccggaaacggtggtcatcatgcccagacgaggatctttaatttcacgctgcaggatgagagcgatctctttttgcatttcctgcgctacgcgctgcgggcgaccaaattctttcgccataataaattctcctgacaaaaaaggggctgttagcccctttttaaaattaatttcaggtggaagggctgttcacgttggcctgataagacgcgccagcgtcgcatcaggcaatccatgcaggatgcgacataaacgccttatcccgcatggaaccctaaaaaccttaagcgatagtacgttggatctcgatgatttcgaatacttcgatcacatcgccagtgcggacatcgttgtagttcttaacgccgataccacattccataccgttacggacttcgttaacgtcatctttgaagcgtcgcagggactccagctcgccttcgtagataaccacgttgtcgcgcagaacgcggatcgggttgtgacgtttaaccacaccttcggtaaccatacaacctgcgatagcaccaaatttcggtgatttgaacacgtcacgaacttccgccagaccgataatctgctgtttcagttccggagacagcataccgctcatcgccgctttcacttcgtcgatcaggttatagatgacggagtagtaacgcagatccaggctttccgcttcaatcactttacgtgcagaggcatcagcacgtacgttgaagccaaccaggatggcgttggacgccgcagccagggtagcgtcggtttcggtgataccacctacgccagaaccgatgatcttcactttaacttcgtcagtagacagtttcagcaaggagtcggaaattgcttccacagaaccctgtacgtctgccttcaggacaatattcacttcgtgaacttcgccttcggtcatgttggcgaacatgttctcgagtttagatttctgctgacgcgccagtttaacttcgcggaatttaccctgacgatagagtgcaacttcacgcgctttcttctcgtcacgtacaacggtaacttcatcacccgcagccggtacgccggacaggccaaggatttccaccggaatggacggacccgcttccagcacttcctgacccagttcgttacgcattgcacgaacacgaccgtattcgaagccacacagaacgatatcgcccttgtgcagagtaccttcacgtaccagaacggtagcaaccggaccacgacctttatcgaggaaggattcgataaccgcaccgctcgccatacctttacgtaccgctttcagctccagaacttccgcctgcagcaggatagcatccagcagttcatcaataccggtacccgcttttgcagatacgtgtacgaactggctttcgccgccccactcttctggcaggatgccgtactgggagagttcgttcttaacgcgatccggatcggcttctggtttatcgattttgttcacagcaaccaccaccggaacacccgccgctttcgcgtgctggatagcttcgatggtctgcggcattacaccgtcgtctgcagcaacaaccaggactacgatgtccgttgcctgcgcaccacgtgcacgcattgaagtaaacgcggcgtgccccggggtgtccaggaaggtgatcatgccgttttcagtttcaacgtggtatgcaccaatgtgctgggtaatgccgcccgcttcgccagaggccactttcgttgaacgaatgtagtccagcagagaggttttaccgtggtcaacgtgacccatgatggtcacaaccggcgcgcgcggttcagccgcagcacccgtgtcacggtcgctcattaccgcctcttccagctcgttttcacgacgcaggataactttgtggcccatctcttcagcaaccagctgtgcggtttcctgatcgataacctggttgatggttgccattgcgcccagtttcatcatcgctttgatgacctgagagcctttaaccgccatcttgttcgccagttcgccaacggtgatggtttcgccgatcacaacgtcacggttaacggcctgagctggcttctggaagccttgctgcagcgaagaacctttacgttttccgcccttaccgccacgtactgctgcgcgagcttcttcacgatcagcttttgattcagcgtgtttgttgcccttcttcggacgcgctgctttcgcgttacgaccacggccacggccgccttcgacttcacgatcgctttcgtcttctgcctggcgagcatgttgagaagtagtgacgtgataatcgctggaatcttcagtcggttccgcgttatcagtccatttgttttcttccgccatacgacgtgcttcttcagcaacgcgacgtgcttcttcttcgagtttacgacgcgcttcttcttcggctttacgcttgagctctgcagcttcctgctcacggcgggctttttcagcctgggcgtttttagtcatatcgtcttgttgattgctcactttgtctttttccgcagcttcacgtttcgcttgttcagcagcttcacgcttagcctgttctgcggcctcacgttcagctttttgttgcgcctcgcgtttagccgattcttctgcctcacgacgggcttgctcttccgcttcacgctgcgcttgctcttccgctgcaaggcgctcagcctcttgcggatcgcgtttcacaaaggtgcgtttcttgcggacttcgatttgtaccgatttgctttttccaccggtaccaggaatgttaagggtgctgcgtgttttacgttgcagcgtcaatttgtccgggcctgaatttttctgattcaggtggtcaatcaaagtctgtttctcttgtgcagacacagagtcgtcagcagacttccggatacctgcatcagcaaattgctgtaccaggcgttccacggaggtctgtcgctctgcggccagcgttttaatcgttacatctgtcatgctgttccttcctgctacagtttattacgcttcgtcaccgaaccagcaaatattacgggcagccataatcaatgctccggctttttcgtcggtcaacccttcgatatcagccagatcatcaatgccctgttcggcgagatcttccagcgtacaaacgccacgggcggccagtttgaatgccaaatcacgatctaccccttcaaggttcagcagatcatcagccggtttgttatcaccgaggctttcttcctgggcctgtgcaatggtggccagtgcatttttagcacgctcgcgcagtgcttcaacggtcggctcatcaaggccttcgatttccaacagctctttcatcggcacataggccagttcttccagcgtcgagaagccttcttctaccagaacagtcgcgaagtcttcatcgatgtcgagatatttggtgaaggtgtcgatcgctgcgtgcgcttccgcctgatgcttagcctgcaggtcgtcaacggtcatcacgttgagttcccaaccgctcagctgcgaagccagacgcacgttctgaccgttacggccaatcgcctgcgccaggttaccggcttcaacggcgatatccatggtgtgtttatcttcatccaccacgatagaagcaacgtctgctggtgccattgcgttaatcacaaactgcgccgggttatcatcccacaggacaatatcgatacgctcgccgcccagttcagtagaaaccgcctgaacacgcgcgccacgcatacctacgcaagcacctaccggatcgatacgtttatcgttggttttcaccgcaattttcgcacgagatcccgggtcgcgagccgctgctttaatttcaatcacttcttcgccgatttccggcacttcaatacggaacagttcgatcagcatttccggcttggagcgggtgacgaacagctgcgcgccacgcgcttccgggcgaacggaatagagcacgccacgaacgcggtcaccagggcggaagttttcacgcggcagcatatcttcgcgcaggatcacggcttcagcgttgttgcccagatccagagagatgttgtcgcggtttacttttttcaccacgccggtgatgatttcaccttcgtgttcacggaactgatcaaccaccatcgcacgttcggcttcacgcactttctgcacgataacctgttttgccgtctgggtagtgatacggtcaaaggtaacagactcaatctgatcttcaacgtaatcgcccaggttcaggctttcatcttcataacgtgcggcttcaagggtgatttccttggtcggctgggtgacttcatcaacaactaaccagcgacggaaggtgtcaaaatcaccgcttttgcgatcgatctgtacgcgaacgtcgatttcttgttcatattttttctttgttgctgtcgccagcgcgctttccaatgcttcgaaaatcttctcgcgaggtagcgccttttcattggatacggcttcaactacagccaaaatttctttgttcatcgcgggcttttcacctcatccagactattaaaagtggggaaccaggttcgccttctggatattactcagcgcgaacacttcatctttaccttcgacggtaactgtgatcatttcaccgtctaccgctttgataacgccctgccatttacgacggttttgtaccgccatacggagaaccagagtcacctcttctccgacaaaacgggcgtagtgttcagccgtgaacagtgggcgatcgagacccggtgaggagacttccaggttataagcaacggtgatggggtcttcaacatccagcacagcacttacctggtggctcacatcagcacaatcatcaacattgatgccatcttcactatcaatatagatgcgcagtgtggatgtgcgaccgcgaataaattcgatgccaaccagttcaaaacccagggcctcaactggcgcagtaatcatctctgttaatttttgctctaatgtggacaagcccacccccaagacataaaaaaagggcctaaagcccagttattctgtagtcagataacaaaaaaccccgataaatcggggctttatataactgaaccctataaccgcaactgcggtctggagcactttccagaaggattttttcaaatcccactacgaaggccgaagtcttcacagtatatttgaaaaaggactctaagggaaagtggttgcgggggccggatttgaaccgacgaccttcgggttatgagcccgacgagctaccaggctgctccaccccgcgcctgaaacgtggcaaattctactcgttttgggtaaaaaatgcaaatactgctgggatttggtgtaccgagacgggacgtaaaatctgcaggcattatagtgatccacgccacattttgtcaacgtttattgctaatcacgtgaatgaatatccagttcactttcatttgttgaatacttttaccttctcctgctttcccttaagcgcattattttacaaaaaacacactaaactcttcctgtctccgataaaagatgattaaatgaaaactcatttattttgcataaaaattcagtgaaagcagaaatccaggctcatcatcagttaattaagcagggtgttattttatgacgacgattctcaagcatctcccggtaggtcaacgtattggtatcgctttttccggcggtctggacaccagtgccgcactgctgtggatgcgacaaaagggagcggttccttatgcatatactgcaaacctgggccagccagacgaagaggattatgatgcgatccctcgtcgtgccatggaatacggcgcggagaacgcacgtctgatcgactgccgcaaacaactggtggccgaaggtattgccgctattcagtgtggcgcatttcataacaccactggtggactgacctatttcaacacgacgccgctgggccgcgccgtgaccggcaccatgctggttgctgctatgaaagaagatggcgtgaatatctggggtgacggcagcacctataaaggaaacgatatcgaacgtttctaccgttacggtctgctgaccaatgctgaactgcagatttacaaaccgtggcttgatactgactttattgatgaactgggtggccgtcatgagatgtctgaatttatgattgcctgcggtttcgactacaaaatgtctgtcgaaaaagcttactccacggactccaacatgcttggtgcaacgcatgaagcgaaggatctggaatacctcaactccagcgtcaaaatcgtcaacccaattatgggcgtgaagttttgggatgagagcgtgaaaatcccggcagaagaagtcacagtacgctttgagcaaggtcatccggtggcgctgaacggtaaaacctttagcgacgacgtagaaatgatgctggaagctaaccgcatcggcggtcgtcacggcctgggcatgagcgaccagattgaaaaccgtagatttgctttttccaccggtaccaggaatgttaagggtgctgcgtgttttacgttgcagcgtcaatttgtccgggcctgaatttttctgattcaggtggtcaatcaaagtctgtttctcttgtgcagacacagagtcgtcagcagacttccggatacctgcatcagcaaattgctgtaccaggcgttccacggaggtctgtcgctctgcggccagcgttttaatcgttacatctgtcatgctgttccttcctgctacagtttattacgcttcgtcaccgaaccagcaaatattacgggcagccataatcaatgctccggctttttcgtcggtcaacccttcgatatcagccagatcatcaatgccctgttcggcgagatcttccagcgtacaaacgccacgggcggccagtttgaatgccaaatcacgatctaccccttcaaggttcagcagatcatcagccggtttgttatcaccgaggctttcttcctgggcctgtgcaatggtggccagtgcatttttagcacgctcgcgcagtgcttcaacggtcggctcatcaaggccttcgatttccaacagctctttcatcggcacataggccagttcttccagcgtcgagaagccttcttctaccagaacagtcgcgaagtcttcatcgatgtcgagatatttggtgaaggtgtcgatcgctgcgtgcgcttccgcctgatgcttagcctgcaggtcgtcaacggtcatcacgttgagttcccaaccgctcagctgcgaagccagacgcacgttctgaccgttacggccaatcgcctgcgccaggttaccggcttcaacggcgatatccatggtgtgtttatcttcatccaccacgatagaagcaacgtctgctggtgccattgcgttaatcacaaactgcgccgggttatcatcccacaggacaatatcgatacgctcgccgcccagttcagtagaaaccgcctgaacacgcgcgccacgcatacctacgcaagcacctaccggatcgatacgtttatcgttggttttcaccgcaattttcgcacgagatcccgggtcgcgagccgctgctttaatttcaatcacttcttcgccgatttccggcacttcaatacggaacagttcgatcagcatttccggcttggagcgggtgacgaacagctgcgcgccacgcgcttccgggcgaacggaatagagcacgccacgaacgcggtcaccagggcggaagttttcacgcggcagcatatcttcgcgcaggatcacggcttcagcgttgttgcccagatccagagagatgttgtcgcggtttacttttttcaccacgccggtgatgatttcaccttcgtgttcacggaactgatcaaccaccatcgcacgttcggcttcacgcactttctgcacgataacctgttttgccgtctgggtagtgatacggtcaaaggtaacagactcaatctgatcttcaacgtaatcgcccaggttcaggctttcatcttcataacgtgcggcttcaagggtgatttccttggtcggctgggtgacttcatcaacaactaaccagcgacggaaggtgtcaaaatcaccgcttttgcgatcgatctgtacgcgaacgtcgatttcttgttcatattttttctttgttgctgtcgccagcgcgctttccaatgcttcgaaaatcttctcgcgaggtagcgccttttcattggatacggcttcaactacagccaaaatttctttgttcatcgcgggcttttcacctcatccagactattaaaagtggggaaccaggttcgccttctggatattactcagcgcgaacacttcatctttaccttcgacggtaactgtgatcatttcaccgtctaccgctttgataacgccctgccatttacgacggttttgtaccgccatacggagaaccagagtcacctcttctccgacaaaacgggcgtagtgttcagccgtgaacagtgggcgatcgagacccggtgaggagacttccaggttataagcaacggtgatggggtcttcaacatccagcacagcacttacctggtggctcacatcagcacaatcatcaacattgatgccatcttcactatcaatatagatgcgcagtgtggatgtgcgaccgcgaataaattcgatgccaaccagttcaaaacccagggcctcaactggcgcagtaatcatctctgttaatttttgctctaatgtggacaagcccacccccaagacataaaaaaagggcctaaagcccagttattctgtagtcagataacaaaaaaccccgataaatcggggctttatataactgaaccctataaccgcaactgcggtctggagcactttccagaaggattttttcaaatcccactacgaaggccgaagtcttcacagtatatttgaaaaaggactctaagggaaagtggttgcgggggccggatttgaaccgacgaccttcgggttatgagcccgacgagctaccaggctgctccaccccgcgcctgaaacgtggcaaattctactcgttttgggtaaaaaatgcaaatactgctgggatttggtgtaccgagacgggacgtaaaatctgcaggcattatagtgatccacgccacattttgtcaacgtttattgctaatcacgtgaatgaatatccagttcactttcatttgttgaatacttttaccttctcctgctttcccttaagcgcattattttacaaaaaacacactaaactcttcctgtctccgataaaagatgattaaatgaaaactcatttattttgcataaaaattcagtgaaagcagaaatccaggctcatcatcagttaattaagcagggtgttattttatgacgacgattctcaagcatctcccggtaggtcaacgtattggtatcgctttttccggcggtctggacaccagtgccgcactgctgtggatgcgacaaaagggagcggttccttatgcatatactgcaaacctgggccagccagacgaagaggattatgatgcgatccctcgtcgtgccatggaatacggcgcggagaacgcacgtctgatcgactgccgcaaacaactggtggccgaaggtattgccgctattcagtgtggcgcatttcataacaccactggtggactgacctatttcaacacgacgccgctgggccgcgccgtgaccggcaccatgctggttgctgctatgaaagaagatggcgtgaatatctggggtgacggcagcacctataaaggaaacgatatcgaacgtttctaccgttacggtctgctgaccaatgctgaactgcagatttacaaaccgtggcttgatactgactttattgatgaactgggtggccgtcatgagatgtctgaatttatgattgcctgcggtttcgactacaaaatgtctgtcgaaaaagcttactccacggactccaacatgcttggtgcaacgcatgaagcgaaggatctggaatacctcaactccagcgtcaaaatcgtcaacccaattatgggcgtgaagttttgggatgagagcgtgaaaatcccggcagaagaagtcacagtacgctttgagcaaggtcatccggtggcgctgaacggtaaaacctttagcgacgacgtagaaatgatgctggaagctaaccgcatcggcggtcgtcacggcctgggcatgagcgaccagattgaaaaccgtattgttgcgcctcgcgtttagccgattcttctgcctcacgacgggcttgctcttccgcttcacgctgcgcttgctcttccgctgcaaggcgctcagcctcttgcggatcgcgtttcacaaaggtgcgtttcttgcggacttcgatttgtaccgatttgctttttccaccggtaccaggaatgttaagggtgctgcgtgttttacgttgcagcgtcaatttgtccgggcctgaatttttctgattcaggtggtcaatcaaagtctgtttctcttgtgcagacacagagtcgtcagcagacttccggatacctgcatcagcaaattgctgtaccaggcgttccacggaggtctgtcgctctgcggccagcgttttaatcgttacatctgtcatgctgttccttcctgctacagtttattacgcttcgtcaccgaaccagcaaatattacgggcagccataatcaatgctccggctttttcgtcggtcaacccttcgatatcagccagatcatcaatgccctgttcggcgagatcttccagcgtacaaacgccacgggcggccagtttgaatgccaaatcacgatctaccccttcaaggttcagcagatcatcagccggtttgttatcaccgaggctttcttcctgggcctgtgcaatggtggccagtgcatttttagcacgctcgcgcagtgcttcaacggtcggctcatcaaggccttcgatttccaacagctctttcatcggcacataggccagttcttccagcgtcgagaagccttcttctaccagaacagtcgcgaagtcttcatcgatgtcgagatatttggtgaaggtgtcgatcgctgcgtgcgcttccgcctgatgcttagcctgcaggtcgtcaacggtcatcacgttgagttcccaaccgctcagctgcgaagccagacgcacgttctgaccgttacggccaatcgcctgcgccaggttaccggcttcaacggcgatatccatggtgtgtttatcttcatccaccacgatagaagcaacgtctgctggtgccattgcgttaatcacaaactgcgccgggttatcatcccacaggacaatatcgatacgctcgccgcccagttcagtagaaaccgcctgaacacgcgcgccacgcatacctacgcaagcacctaccggatcgatacgtttatcgttggttttcaccgcaattttcgcacgagatcccgggtcgcgagccgctgctttaatttcaatcacttcttcgccgatttccggcacttcaatacggaacagttcgatcagcatttccggcttggagcgggtgacgaacagctgcgcgccacgcgcttccgggcgaacggaatagagcacgccacgaacgcggtcaccagggcggaagttttcacgcggcagcatatcttcgcgcaggatcacggcttcagcgttgttgcccagatccagagagatgttgtcgcggtttacttttttcaccacgccggtgatgatttcaccttcgtgttcacggaactgatcaaccaccatcgcacgttcggcttcacgcactttctgcacgataacctgttttgccgtctgggtagtgatacggtcaaaggtaacagactcaatctgatcttcaacgtaatcgcccaggttcaggctttcatcttcataacgtgcggcttcaagggtgatttccttggtcggctgggtgacttcatcaacaactaaccagcgacggaaggtgtcaaaatcaccgcttttgcgatcgatctgtacgcgaacgtcgatttcttgttcatattttttctttgttgctgtcgccagcgcgctttccaatgcttcgaaaatcttctcgcgaggtagcgccttttcattggatacggcttcaactacagccaaaatttctttgttcatcgcgggcttttcacctcatccagactattaaaagtggggaaccaggttcgccttctggatattactcagcgcgaacacttcatctttaccttcgacggtaactgtgatcatttcaccgtctaccgctttgataacgccctgccatttacgacggttttgtaccgccatacggagaaccagagtcacctcttctccgacaaaacgggcgtagtgttcagccgtgaacagtgggcgatcgagacccggtgaggagacttccaggttataagcaacggtgatggggtcttcaacatccagcacagcacttacctggtggctcacatcagcacaatcatcaacattgatgccatcttcactatcaatatagatgcgcagtgtggatgtgcgaccgcgaataaattcgatgccaaccagttcaaaacccagggcctcaactggcgcagtaatcatctctgttaatttttgctctaatgtggacaagcccacccccaagacataaaaaaagggcctaaagcccagttattctgtagtcagataacaaaaaaccccgataaatcggggctttatataactgaaccctataaccgcaactgcggtctggagcactttccagaaggattttttcaaatcccactacgaaggccgaagtcttcacagtatatttgaaaaaggactctaagggaaagtggttgcgggggccggatttgaaccgacgaccttcgggttatgagcccgacgagctaccaggctgctccaccccgcgcctgaaacgtggcaaattctactcgttttgggtaaaaaatgcaaatactgctgggatttggtgtaccgagacgggacgtaaaatctgcaggcattatagtgatccacgccacattttgtcaacgtttattgctaatcacgtgaatgaatatccagttcactttcatttgttgaatacttttaccttctcctgctttcccttaagcgcattattttacaaaaaacacactaaactcttcctgtctccgataaaagatgattaaatgaaaactcatttattttgcataaaaattcagtgaaagcagaaatccaggctcatcatcagttaattaagcagggtgttattttatgacgacgattctcaagcatctcccggtaggtcaacgtattggtatcgctttttccggcggtctggacaccagtgccgcactgctgtggatgcgacaaaagggagcggttccttatgcatatactgcaaacctgggccagccagacgaagaggattatgatgcgatccctcgtcgtgccatggaatacggcgcggagaacgcacgtctgatcgactgccgcaaacaactggtggccgaaggtattgccgctattcagtgtggcgcatttcataacaccactggtggactgacctatttcaacacgacgccgctgggccgcgccgtgaccggcaccatgctggttgctgctatgaaagaagatggcgtgaatatctggggtgacggcagcacctataaaggaaacgatatcgaacgtttctaccgttacggtctgctgaccaatgctgaactgcagatttacaaaccgtggcttgatactgactttattgatgaactgggtggccgtcatgagatgtctgaatttatgattgcctgcggtttcgactacaaaatgtctgtcgaaaaagcttactccacggactccaacatgcttggtgcaacgcatgaagcgaaggatctggaatacctcaactccagcgtcaaaatcgtcaacccaattatgggcgtgaagttttgggatgagagcgtgaaaatcccggcagaagaagtcacagtacgctttgagcaaggtcatccggtggcgctgaacggtaaaacctttagcgacgacgtagaaatgatgctggaagctaaccgcatcggcggtcgtcacggcctgggcatgagcgaccagattgaaaaccgtagtgcgtttcttgcggacttcgatttgtaccgatttgctttttccaccggtaccaggaatgttaagggtgctgcgtgttttacgttgcagcgtcaatttgtccgggcctgaatttttctgattcaggtggtcaatcaaagtctgtttctcttgtgcagacacagagtcgtcagcagacttccggatacctgcatcagcaaattgctgtaccaggcgttccacggaggtctgtcgctctgcggccagcgttttaatcgttacatctgtcatgctgttccttcctgctacagtttattacgcttcgtcaccgaaccagcaaatattacgggcagccataatcaatgctccggctttttcgtcggtcaacccttcgatatcagccagatcatcaatgccctgttcggcgagatcttccagcgtacaaacgccacgggcggccagtttgaatgccaaatcacgatctaccccttcaaggttcagcagatcatcagccggtttgttatcaccgaggctttcttcctgggcctgtgcaatggtggccagtgcatttttagcacgctcgcgcagtgcttcaacggtcggctcatcaaggccttcgatttccaacagctctttcatcggcacataggccagttcttccagcgtcgagaagccttcttctaccagaacagtcgcgaagtcttcatcgatgtcgagatatttggtgaaggtgtcgatcgctgcgtgcgcttccgcctgatgcttagcctgcaggtcgtcaacggtcatcacgttgagttcccaaccgctcagctgcgaagccagacgcacgttctgaccgttacggccaatcgcctgcgccaggttaccggcttcaacggcgatatccatggtgtgtttatcttcatccaccacgatagaagcaacgtctgctggtgccattgcgttaatcacaaactgcgccgggttatcatcccacaggacaatatcgatacgctcgccgcccagttcagtagaaaccgcctgaacacgcgcgccacgcatacctacgcaagcacctaccggatcgatacgtttatcgttggttttcaccgcaattttcgcacgagatcccgggtcgcgagccgctgctttaatttcaatcacttcttcgccgatttccggcacttcaatacggaacagttcgatcagcatttccggcttggagcgggtgacgaacagctgcgcgccacgcgcttccgggcgaacggaatagagcacgccacgaacgcggtcaccagggcggaagttttcacgcggcagcatatcttcgcgcaggatcacggcttcagcgttgttgcccagatccagagagatgttgtcgcggtttacttttttcaccacgccggtgatgatttcaccttcgtgttcacggaactgatcaaccaccatcgcacgttcggcttcacgcactttctgcacgataacctgttttgccgtctgggtagtgatacggtcaaaggtaacagactcaatctgatcttcaacgtaatcgcccaggttcaggctttcatcttcataacgtgcggcttcaagggtgatttccttggtcggctgggtgacttcatcaacaactaaccagcgacggaaggtgtcaaaatcaccgcttttgcgatcgatctgtacgcgaacgtcgatttcttgttcatattttttctttgttgctgtcgccagcgcgctttccaatgcttcgaaaatcttctcgcgaggtagcgccttttcattggatacggcttcaactacagccaaaatttctttgttcatcgcgggcttttcacctcatccagactattaaaagtggggaaccaggttcgccttctggatattactcagcgcgaacacttcatctttaccttcgacggtaactgtgatcatttcaccgtctaccgctttgataacgccctgccatttacgacggttttgtaccgccatacggagaaccagagtcacctcttctccgacaaaacgggcgtagtgttcagccgtgaacagtgggcgatcgagacccggtgaggagacttccaggttataagcaacggtgatggggtcttcaacatccagcacagcacttacctggtggctcacatcagcacaatcatcaacattgatgccatcttcactatcaatatagatgcgcagtgtggatgtgcgaccgcgaataaattcgatgccaaccagttcaaaacccagggcctcaactggcgcagtaatcatctctgttaatttttgctctaatgtggacaagcccacccccaagacataaaaaaagggcctaaagcccagttattctgtagtcagataacaaaaaaccccgataaatcggggctttatataactgaaccctataaccgcaactgcggtctggagcactttccagaaggattttttcaaatcccactacgaaggccgaagtcttcacagtatatttgaaaaaggactctaagggaaagtggttgcgggggccggatttgaaccgacgaccttcgggttatgagcccgacgagctaccaggctgctccaccccgcgcctgaaacgtggcaaattctactcgttttgggtaaaaaatgcaaatactgctgggatttggtgtaccgagacgggacgtaaaatctgcaggcattatagtgatccacgccacattttgtcaacgtttattgctaatcacgtgaatgaatatccagttcactttcatttgttgaatacttttaccttctcctgctttcccttaagcgcattattttacaaaaaacacactaaactcttcctgtctccgataaaagatgattaaatgaaaactcatttattttgcataaaaattcagtgaaagcagaaatccaggctcatcatcagttaattaagcagggtgttattttatgacgacgattctcaagcatctcccggtaggtcaacgtattggtatcgctttttccggcggtctggacaccagtgccgcactgctgtggatgcgacaaaagggagcggttccttatgcatatactgcaaacctgggccagccagacgaagaggattatgatgcgatccctcgtcgtgccatggaatacggcgcggagaacgcacgtctgatcgactgccgcaaacaactggtggccgaaggtattgccgctattcagtgtggcgcatttcataacaccactggtggactgacctatttcaacacgacgccgctgggccgcgccgtgaccggcaccatgctggttgctgctatgaaagaagatggcgtgaatatctggggtgacggcagcacctataaaggaaacgatatcgaacgtttctaccgttacggtctgctgaccaatgctgaactgcagatttacaaaccgtggcttgatactgactttattgatgaactgggtggccgtcatgagatgtctgaatttatgattgcctgcggtttcgactacaaaatgtctgtcgaaaaagcttactccacggactccaacatgcttggtgcaacgcatgaagcgaaggatctggaatacctcaactccagcgtcaaaatcgtcaacccaattatgggcgtgaagttttgggatgagagcgtgaaaatcccggcagaagaagtcacagtacgctttgagcaaggtcatccggtggcgctgaacggtaaaacctttagcgacgacgtagaaatgatgctggaagctaaccgcatcggcggtcgtcacggcctgggcatgagcgaccagattgaaaaccgtatcatcgaagcaaaaagccgcggcatttatgaagcccctgggatggcactgctgcacattgcgtatgaacgtttgttgaccggtattcacaacgaagacaccattgagcagtatcacgcgcatggtcgtcagttgggccgtctgctgtaccagggacgttggtttgattcccaggcgctgatgctgcgtgactctctgcaacgctgggttgccagccagatcactggtgaagttactctggagctgcgccgcgggaacgattattcaatcctgaataccgtctcagagaacctgacctacaaaccagagcgtctgacgatggaaaaaggcgactcggtgttctcgccagatgatcgtatcggtcaactgaccatgcgtaacctggatatcaccgatacccgcgagaaacttttcggttatgccaaaactggcctgctctcctcctctgccgcttcaggggtgccgcaggtggagaatctggaaaataaaggccagtaattcgacatcaaccctgcccttcaggggtggggttaccttgattatcctctgtaaactcctttctgagcatcacataatcgaaaacatcatggtttgcatccacaacccgtgagtctcctttatagtgtgcaatcacttcctcaagcgtttgcggctgttccggctttgttacccccatccacgcattaataaggtaattattgtaagctgtcgaaaagatgttgttttccgttgtgcgatccacgccatcccctagaacggggctataccagataaacatcgggacatgatacgcctgctggctagcctccctgcctccatgaaaatagacgttcttcttcgtagggtcgcgttccaggccgtggtcggcaaaatacatgaccgaggcgcggcgatcttttaataattcaaaaacctgacctagcaaactatctgtgtaatgaatggagttgtcatagcaggcatcctgatcgtcctgcggttgaaacacagcgctggattgcggataggcgctacaagccggttcatggcttccatttaaatgaagaacaatcagtttcttttgctgcgtcttttgctgtaacgcttgcgataaatgcggcaacaacaattcatcaaatcctctgacatagactgtttccatggcgcgcatggcgatactggtaactgctgtaccattctgccgaaaagcggattgcgagcttagccagaaagtctgaaatcctgcttgattagccatattaataatgttgtccgggtaattatgaatgtcatgactcaaaacagaatcagcagttaaagaaaggggaaccgacagcgcagtgtaaggtgcaccgcttattgcttgattaaacagtttgatctgttttctttgtgcttcgacttgcggtgtcgtagagcgtgtatatccatacaaagacatattgtcgacacgtacagactcccccacaatcaacacgtaggtatcaatacctgtatccctgactgataattgaaaacacggcaccgtgtttgcaattgagagtaatctttgatgctctttcgctgctaaagcaaaataattgagattgaaaaacggtgtataggtagcaaatcgcgacgctagtatatatggactgaacgcttttttattttttgcatctttataagcaaattgacaagcggaaaataaactgcccgaaatgacaatcagcaataatattcctgtcacttttttcgtcggcaaggaaacatcatattttattattactgccaaaaaaagaagggataaaaaggcaaaagcacatagataagggatatacatccccagcattttgacaacttcatccggatcactctgcagcacactaatcgcaaatccatcattgaaagttgtaccaaaggtacaccatgaatagaggctaatactcatgtctgccgctgtcagtaacacaaatggtgtggcaacaagcaggcgaagcggaagggatgatatacgtttaacaaccaggatggtcagaacgaaaaacagcaatcgctgaaccatatgcgctccggaagaggcgactaagttcgtaataccaaaaacaataacacaaagatacaacaaccaatgagatttaaaacttctaacaaatttgttgaatactgtcatccagaaatccaagttcacaaccaatataaacaattatcaacaatgttcaattttatatcagacatgtttttcaactctgatccatatcagaccgaaacactgttagttttttctttttaaatgatgcggccattgttctcagtaattaaataacattatcaatgcgtctctaaacattacgcagaacgtagccatcagtagttatactgacaggagcaggatggtttatcgagaagtaaacatatccgtattcgtaccggaactggagttgacacaataaagtgccaattatgtcagcagaagggaaaagtttataactaaggcgtaccggcaccatcgtttcaaagtaccagctacgagtaaagcaactggacgagatacagatacctgacaaccattcctcagaccaggaccaaaacgaaaaaagacgcttttcagcgtctcttttctggaatttggtaccgaggacgggacttgaacccgtaagccctattgggcactaccacctcaaggtagcgtgtctaccaattccaccacctcggcacggatactactttttagttcgggatatcgctggtcggcttagccggagcagctggctgagtttgttcggttttcgccggcgcactcaggttttcccattcgctacctttattggttttattgctattgatgttacccagcaccagactgatgatgaagaataacgttgccagcagcgccgtcatgcgggtcatgaagttaccagaaccacttgaaccaaacagcgtagcggaagcgcctgctccgaaggaggctcccatatcagcgcctttaccttgctgcagcatgatcagaccaacaaggccaattgccacaataaggaaaactactaaaagagcttcgtacataatcaacctgttccttgcggagttgccgcgtaccaatgcttcaaccaataaagcgggagtttttaatctttcccactgaagcgggtgtgaatactaaccaaagcgaatgaccttcgcaagggcaattttattgcattgtatcaactgcggaaaaaaacagcaaaaccgatgtgttcgctgagaaaaaaggcgacaatcgccgcctttttagccagttatctaacgctttaaacggcttttactgcatcggcgatgcggtgtgcaaattcagtcacctgcgcttcgtcttcgccttccaccatcacgcgaattaacggttcggtgccggatttacgcaacagcacacgtccacggctacccagcgccgcttcaacttctgcggtcacagctttgactgattcatgctccagcggatcgccgctacctgcggtgtaacgcacgtttaccaggatttgcgggaacattttcatgccgctgcaaaggtcgtgcaggctcatatgattacgcgccatcgccgccagcacctgcaaaccagcaacgatgccgtcaccggtagtggttttatccagcaggatcacatgaccggaattctctgcaccgatacgccagcctttctcctgcattttttccagtacgtagcggtcacccactttcgcgcgcgcaaatggaattcctaactgtttcagcgccagttcaagccccatgttgctcatcaatgtacccacagcgccaccacgcagctggccctgacgaagaccttcacgcgcgatgatatacatgatctgatcgccatcgactttattgccttcatggtcaaccataatcacgcgatcgccgtcgccgtcgaaggcaataccgagatccgctttttcagccagcacacgagcctggagcgcgcgaacgtcggtagcccccacttcggcattgatgtttacaccgttcggctcacaaccgatagcgataacgttcgctcccagttcacgcagcacgttcggcgcgatgtgataagtcgcaccgtttgcacaatccaccacaatcttcagttcactgaggctaagttcgtttgggaacgtggctttgcaaaactcgatatagcgacccgcagcatcaacgatacggctggctttacccagttctgccgaatcaacacagctgatctctttttccatttccgcttcgatggcctcttctactgcatccggtagtttggtgccgtcgatagagaaaaatttaatgccattatcgtagaacgggttatgcgatgcagatatcacaattccggcctctgcgcggaaggtacgcgtcagataagccacggccggtgttggcatcggaccagtgaagagtgcggaaaggcccgcagccgccagacccgcttccagtgctgactccagcatgtagccagaaatacgcgtgtctttaccaatgatgatcttacgggagccgtggcgcgccagcactttacccgcggcccaacccagcttaagcacaaaatcaggggtgatcggcgcatcccctacacgaccacgaatcccatcggtaccgaaatatttacgattactcatagcgtttgttttcctttgcagacagagtggcttccaccacccgcatcgcttctacggtttctttgacgtcatgaacacgaatgatatgcgcgccttgcatagcggcaatgaccgcacaagccagactaccgctcagacgctcggacggccccacgttcagcagctgcccaatcatcgattttcgtgacatacccaccaacagcggcaggttgaaatggtgaaattcagccaggcgcgccagtaatgaatagttatgggagagatttttaccgaaaccgaatccggggtcgagcaacaatttctcttttgcgatacccgcctgctcgcaacgtgctatttgctcaataaaatagcgattcacttctgcaaagacatcgtcatacttcggggcttcctgcatggtctttggatttccctgcatatgcatcagacaaaccggtaaaccggtttctgcagctgcctccagagcccctggttcggaaagggagcggatatcgttaataatgtgagcgccaactttcgctgactcacggatgacttctggtttggatgtatcgaccgagatccagacttcgaagcgttgagcaattgcctcaaccacaggaataacacgttgcaactcttcttcaacgctaacttccgccgctcctgggcgcgtggactcgccaccaacgtcaatgatcgtcgcgccagcgttgatcatcagattcgcatgtttcaccgcatctatcagcgagttatgcgtaccgccatccgaaaaggaatcaggcgtgacgttgaggatccccattacgtgaggatggctaaggtccagtgaagtgccctgggcaaagagtttcatggtgttatccctggtatgaattgataagaaaaaaccccggagcacgccccggggttttcggtacaaatacagtcatctgatgcgggaacttatttgtcgcctaactgctctgacatggtgttacccgggttcggcgtacgcggttcatcaaccggacgaggagcctttggactaccattgtcgccagaattgttagaagcgcctggttcttcccagcccgctggcggacgtacatcgcgacgtgccatcaggtcatcaatctgcggtgcgtcgatagtctcatatttcatgagagcatctttcatcgcatgcagaatatccatattgtcggtcagaagctgacgcgcacgattatagttacgctcaatcagtgctttcacttcctggtcgatgatacgtgcagtttcatcggacatatgtttcgctttcgcatacgctacggccgaggaacacttcaccttcttcttccgcgtacagcagtggacccaatttctcagagaagccccactgagtcaccatgttacgtgccaggttggtcgcaactttaatatcgttggacgcaccggtagaaacatgttccggcccgtagatgatctcttccgccagacgaccaccgtacagcgtagaaatctggctttccagtttctgacggctggcgctgattgcgtcgccctcaggcaagaagaaagtcacacccagcgcacgaccgcgtgggataatcgtcactttgtgcaccggatcgtgttccggcaccaggcgaccgataattgcgtgacccgcttcgtggtaagccgtcgattctttctgcgcttccgtcatcaccatggagcgacgttccgcacccatcatgattttgtctttcgctttctcgaactcaaccatcgaaacaacgcgtttgttgccacgagcagcgaacagtgccgcttcgttcaccaggttcgccaggtcagcaccggagaaaccaggagtaccacgggcaatgattgccgcgtcgatatcgggtgccaatggtacgcgacgcatgtgaactttcaggatctgctcacgaccgcgaacatctggcaagccaaccacaacctgacggtcgaaacggccaggacgcagcagggctgggtcgagaacgtccggacggttagtcgcagcgataacgatgataccttcgttaccttcaaaaccatccatctcaaccagcatctggttcagagtctgttcacgttcatcgtgaccaccgcccaagcctgcgccgcgctggcggcctacggcgtcgatttcatcgataaagatgatgcacggcgccgctttcttcgcctgttcgaacatgtcacgaacacgggatgcacccacaccgacgaacatttctacgaagtcagaaccggagatagtaaagaacggaactttcgcttcgcctgcaattgctttcgccagcaacgttttaccggtacccggaggacctaccatcaggacgcctttcgggatcttaccgccgagtttctggaagcggctcggctcgcgcaaatactcaaccagttcagcaacttcttcttttgcttcgtcgcagcccgcaacgtcagcaaaggtggttttgatctgatcttccgtcagcatgcgcgctttgctcttaccaaacgacatggcacctttgccaccgccgccctgcatttgacgcatgaagaagatccagacaccaatcagcaacagcatcgggaaccaggagatgaagatagaagccagcaggcttggttcttcaggcggttcaccgacaaccttgacgttcttggtcaacaggttatccagtaatttcggatcctgaaccggaatgtaagtggtataacggttactatctttcttggtaacgttgatttcacgtccgttgatacgcgcttcacgaacctggtcgttattgacctcttgtaggaaggtagagtaatccaccttacggccattagactcgctgggcccaaagctctggaatactgacatcagcacaacggcaatgaccagccagagtattaggtttttcgccatgtcactcaagggattaacctcttattacaactgtgttaaaaacagcgtcaggatactctatatccagcatctttcaaactttcgtctgaaatctcccggttagggtttacgcccggtcgctacaatatacacttcccgcgaacgtgcacgagaagagtccggcttacgaactttgaccttcgtaaacagggagcgaatttcccttagatactcatcgaaaccttcgccctggaacaccttcactacaaaactgccacctggcgctaatacatcacgacacatttctagcgccagttccaccagatacatggcacgggggatatccaccgccggtgttccgctcatgtttggtgccatatcggacatgacaacctggactttgctgtcgccaacgcgctccagcagtgctttcatcaccagttcatcacgaaaatcgccctgaagaaagtccacaccaacgataggatccataggtaaaagatcgcaagcgatgatgcggcctttgccgccaatttgggtgaccacatattgtgaccaaccacccggagctgcaccaaggtcgacaaccgtcattcccggtttaaagagtttgtcactttgctgtatttcatcaagtttaaaccaggcacgggaacgtaacccctttttctgtgcctgttgaacatatttatcgctaaagtgttcctgaagccagcggctggagctggcagaacgcttcttacctgtcatttaactttcccatggggataactcatcgtaaccaattgcgtaaatttttacgcgcctatttggtgatatatgggagatggcggtagaatgacccgttttcaatcccaacgtaagcaaaaaatacgatgaatctgagtactaaacaaaaacagcacctgaaaggtctggcacatccgctcaagccagttgttctgcttggcagtaatggtttgaccgaaggggtgctggccgagattgaacaagcgttagagcaccatgaactcatcaaggtgaaaatcgccaccgaagatcgcgaaactaaaaccttgatcgtggaagctatcgtgcgcgaaaccggcgcctgtaatgtacaggtcatcggtaaaacgctggtgctttatcgcccaactaaagaacgtaaaatctcgctgccacgctaagattatcctaaagttacacacattcgctgtgtaaaacgaggggttttccgcaggcaggagagcaaaatgccacgctctgttcgttgataaaaggccgcatagcggcctttttcctttctttacaatacatcaacatcttgagtattgggtaattcttacaggtattccaccttaattacttcaaattctacttcgccgcccggcgttttgatgaccacaacatcatcttcttctttgccgatcaggccacgagcaataggcgagtttacagaaatcaggttttgtttaaagtcagcttcgtcatcgccaacgatgcgataagtctgttcttcgtcagaatcgagattcagcaccgttacggtagcaccaaaaataacgcgcccattgttgggcattttggtgacatcaatcacctgcgcgttcgacagcttggcttcgatgtctttgatacggccttcgcagaaaccctgctgttcacgagctgcgtggtattcggcgttttctttcaggtcgccatgctcacgcgcttccgcgatagcagcaatgatttcaggacggcgcacagatttcagaaaatccagctcttcgcgtaatttttcagcgccgcgtaaggtcatcggaatagcttgcatttgttatacctcttgaatattcctgatggggcaagtcttcacccaccccggctgttcggcctgcccggcataactcctcaccgggaccagaagcaaaaaaaataccgacccgggtacaagtcccaggtcagctacaattcacattttgatagtcattttaccctggagttcccgaagggtcatcgtttactttatagggcgttgcgccgtagtatgacggctcgattccaggttgttagcgcgagattatgcgattttccagatttatcatcggattgaccagctgtatagcgttcagtgttcaggccgcaaatgttgatgagtacattactcaactccccgcaggtgccaaccttgccctgatggtgcaaaaagtcggcgcgtcggcccccgctattgattaccacagtcagcagatggcgctacccgccagtacgcagaaagtaattactgcgctggcggcgttgattcaactcggccccgattttcgttttaccacgacgcttgaaaccaaaggcaatgtggaaaacggcatacttaagggtgacttagtagcgcgatttggtgccgatccgacgttaaaacgtcaggatattcgcaatatggtcacgactttgaaaaaatctggcgtcaaccaaatcgatggcaatgtgttgatagatacctccattttcgccagccacgataaagcccccggctggccatggaatgacatgacacaatgctttagcgctccgcctgccgccgccatagttgaccgcaactgtttctccgtctcgctctacagtgccccaaaacctggtgatatggcttttatacgcgtggcatcttattaccccgttacgatgttcagtcaggtacgcaccctcccccgtggttctgccgaagcgcaatactgcgaactggatgtcgtacttggtgacctgaaccgctttacgctaacgggatgcctgccacaacgttctgagccgctcccgttggcttttgccgtgcaggatggtgccagctatgccggggcaattctgaaagatgagttaaaacaggcgggtatcacctggagcggaacgctgctgcgccagactcaggttaacgaacctggaacggtagttgccagtaaacagtcggccccgctgcacgatctgcttaagattatgctgaaaaagtcggacaacatgattgccgatacggttttccgcatgatcggccatgcgcgcttcaatgtgcctggaacatggcgggccggatcggacgccgtgcgtcagatcctgcgccagcaagccggtgtcgatatcggaaacaccattattgccgatggttcagggctttcgcggcataacctgattgcccccgccaccatgatgcaggtgctgcaatatattgcccaacacgacaatgaacttaactttatctccatgctgccgctggcgggctatgacggctctttgcagtaccgtgcaggtctgcatcaggcgggcgtggatggaaaagtctcagcgaaaaccggttcgttgcagggggtatataacctggcgggattcattaccacagcgagcgggcaacgaatggcgtttgtgcaatatctttctggctatgcagtagaaccggcggatcagcgtaatcgccgtattccgttagtgcgttttgaaagccgtttgtataaagatatttatcagaataattagcctaaagagaaaccccggcacatggccggggttttgctgattaacgcttgtaaatgaactcaacgccttcttcgtcgtcttcgtcccagtcgtcatcccagtcctcatcatcctcttcagcaatctcttcaagctgctgacggtgataatcatcccacatgaattcgactttctctggctgtttcgcttcttcagcctgcacgaccgggttttcaatgataaaggtcatcacatcccagcagagatctttcacgcccagtccgctcgccgcagagatcagataatatttatcttcccagcccagcgcttcagcgatcgctttcgctttctcttcggcttctaccttatccagcagatcgatcttgttgaagactaaccaacgcggtttcgccgccagatcctggctgtatttttccagctcactgataataatacgcgcgttttcaaccggatcggtgccgtcaatcggatcgatatcgatgaggtgcaacaggacgcggcaacgttccaggtgcttcaggaagcgaatgcccagacctgcgccttctgcagcgccttcaatcagtcctggaatatcggcaacaacgaagctcttttcgttgtccatacgcaccacgcccaggcttggtaccagagtggtaaacggataatccgccactttcggtttagccgccgataccgcacgaataaaggtcgatttacccgcgtttggcatccccaacataccgacgtcagccagcagcatcagctccagcagcagctcacgcttatcgcccggcgtaccgttagttttctgccgtggtgtacggttaactgacgacttgaaacgggtattgcccagaccgtgccagccgcccttagcaaccagcagacgctgaccgtgtttggtcatatcgcccatggtttcaccggtaccctggtcgattacacgcgtacctaccggtactttaatcgtgacgtctttaccgcgcttaccggtacagtctcggcttgcaccgttctgaccgcgctctgcacggaaagatttttcaaaacgataatcgataagcgtgttcaggttctcgtcggcttccatccatacgtcaccaccatcaccgccgtcgccgccatccgggccgcctttcggaatatacttttcgcggcggaagctcacgcaaccattaccgccatcacctgcaacgaccagaatcgatgcttcatcaacaaacttcattttattctccgtaaatcattcgcctgcgcggggttgcgataccaccgttgtatgcttacgtaatccgccccaaatacgatgaccaatggcggaatacatcgcgcccgcaaccacgacaaacgcaccgagataacctaaaaggtttaacatcggtctggcgaagaaatcgggccaggccagtgataaaagatctgaaaaaaacagcgtaaacagtggggtgagcgtgatgatcgcgctcacctgcgctgcctgccagcgagccatcgcttccgccagggcgccatatcctaccaatgtattcagtccgcaaaaaattaaacatgcgagctgccagtggctaagctgcgctatcactccaggatttgccagagggaagagcgcaattgtacataaagtgtacagtaaaaacaggatctgcggtgaagccagccgacgcaataaaaccttttgcgccacgccataactcacccaaaccgtcgccgcaccgaccccaaagataactccccaggtgtaatcggtgagctttgtaaatatctcgaccagactggtgttaaaaaacatcaccaggccgctcaggagcatcaatgcccctacaacctgagtactgcgcattttctctttcaggataaatacgctggcaaccatcatgccaactggcgagagttgcccaatcacctgcgaagcggtcggactcaggtattgcaaggatgagctgaacaggatgaagttcccaaacagcccggcggtcgccactgctaacaaaatcaaccagcgtggcttacgaaacacgcgtaatggcggcaaccgcttcttcaccgcaagaatggcaccaaggccaatactcgccatcaagaaacggtaaaacacgattgtcggaggttccatcacctccagcacctgcttcattgcgattggcaacgccccccagcaaattgctgtggtgagcgccaaaagaatgccaatgcctgcctgctgcttcataccgtattccctgcaaagcgcatatgcggattaacgtcgcaccatgcgcatttttaccggttatcgaatgtaaaaagccccgcaacgtgttgcggggctttcatccgttaccgggacgcgaaaaacttattcagcttcgatgctgataaatttacggtttttcgggcctttaacttcgaatttcactttaccgtctgctttagcaaacagagtgtggtcacgaccgcaacctacgttagcgccagcgtggaatttggtaccacgttgacgaacgatgatgctacccgccagaacggattcgccaccgaaacgcttaacgcccaggcgtttagcttctgaatcgcgaccgttacgtgtggagccgccagcctttttatgtgccatttgaaatctctcctcaggtcttaggcgctgatgccagtaattttcacatcagtgaaccactgacgatggccctgctgcttacgatagtgtttacgacgacgaaacttaacgattttaactttctcgccacgaccgtgagcaacaacttcagctttgattacgccgccatcaacgaaaggaacgccgattttgacttcttcaccgtttgcgatcatcagcacttcagcgaactcaacagtttcgccagttgcgatgtccagcttttccaggcgaacggtctgaccttcgcttactcggtgttgtttaccaccactttggaaaaccgcgtacatataaaactccgcttccgcgcacaccttttcaatgattcagagtgcgctataaatattcacaatagggcgcgaatattacgcaaaacgcacgcctttgacaagtgctacagtcaatacacgaagaaaaaaaacacaacttgtacggtaacgtttatctgtgccattttttcagtacaatcaccctatattcctaaccataaaccctaagttgcctttgttcacagtaaggtaatcggggcgaaaagcccggcttttgcgatgaatttagaaaaaatcaatgagttaaccgcgcaagatatggcgggtgttaatgcggcaatccttgagcagcttaattccgacgtccaactgatcaatcagttaggctattacatcgtcagcggcggcggtaaacgtattcgtccgatgattgctgtactggctgcacgagctgttggctatgagggaaatgcgcatgtcaccattgctgccctgatcgagtttatccacacggcgactctgctacacgacgatgttgtggatgaatcagatatgcgcaggggtaaagctaccgccaacgccgcatttggcaatgccgccagcgtgctggtaggcgattttatttatacccgcgcgttccagatgatgaccagcctcggttcactcaaagtgctggaagtcatgtcagaagccgtaaacgtcatcgcagaaggtgaagttctgcaactgatgaacgttaacgatccggacatcactgaagaaaactacatgcgcgttatctacagcaagactgcgcgtctgtttgaggctgccgcgcagtgttccgggattctggctggctgtacgccggaggaggagaaaggcctacaagattatgggcgctatctcggcactgctttccagttgatcgacgatttactcgattacaatgccgatggcgaacagttaggtaaaaacgtcggcgacgatctgaacgaaggtaaaccgacgctgccgctgctgcatgcgatgcatcatggcacaccagaacaggcacagatgattcgtaccgccatcgaacagggtaacggtcgccatcttctggaaccggttctggaagcaatgaacgcttgtggatctcttgaatggacgcgtcagcgtgccgaggaagaagcagacaaagccatcgcagcgttacaggtgctcccggacaccccgtggagagaagcactcgtcggcctcgcgcacatcgctgttcaacgcgatcgttaatcccctcccctcatcccgcgcagtgcgcgggatgattccagtaaattccataaaatacttattcagctctataactcctgaaaaactgggctgtgtatctttatatattctgaatattcacactctttacaggaactttttagagcaataggccatcaggagtatagtgatgctcgacagaaacagaagaagtgttctgaatgaaagcgactaacttaaggagtgaggaaagatggaaagtaatttcattgactggcatcccgctgacatcattgcaggtttgcgcaagaagggaacgtcaatggcggcggagtctcgcagaaatggtttgagttcctcaacgctggcgaacgcattatcacgcccatggccgaaaggagagatgattattgcgaaagccctgggaactgacccctgggttatctggccatcacgctaccatgatccgcagacccatgagtttatcgacagaacgcaattgatgcgtagctacactaaaccgaaaaaatgagtggtctggcggtagccccgcgaacggggctgccagctctcagacaattactcgcctttcacacgctcaatatttgcacctaaagcgcgtagtttgtcttcaatgcgttcgtagccacgatcgatgtgataaatacgatcaaccaccgtcgtcccttccgcaatacagccagccagcaccaggcttgctgatgcacgcagatcggttgccataacctgtgcgccagaaagtttttcaacaccgtgacaaataacggtattgctttcgatttcggcgtgcgcgcccatacggctcagctctggcacatgcataaagcggttttcaaagaccgtttcggtgatgaatccggtcccttctgccaccaggttcaacagcgtgaactgggcctgcatatcggtagggaatgccggatgcggcgcggtacgtacgttaacagccttcggacgtttgccatgcatatccaggctaatccagtcctcgccgacttcgatgtccgctccagcgtcacgcagtttcgccagcacggcgtccagagtatctggctgcgcgttacggcagataattttgccgcgagagatcgccgccgccaccaggaaagtaccggtttcgatacgatccggcagcacgcgatagacaccgccgcctaaacgttccacaccttcgatgacgatacgatcggtgccctgaccgctaattttcgcacccagcgtaatcaggaagttcgcggtatcgacgatttccggttcacgcgctgcgttttcaataatcgtggtgccttccgcaagggttgcagcacacatgatggtcaccgttgcgccaacgctgactttatccatcacgatatgtgcgcctttcaaacgaccatcgacggaagctttaacgtaaccttcttccagtttgatggtcgcgcctaattgttcgaggccagaaatgtgtagatcaaccggacgtgcgccgatcgtacaaccgccaggcagtgaaacttgcccctgaccaaagcgcgctaccagcggccccagcgcccagatagaagcacgcatggttttaaccagatcgtaaggtgcgcagaatacattaacgtcgcgggcatcaatatgcacagaaccattacgttctactttcgcacccagctggcttagcagcttcattgatgtatcgacgtcttttagtttcgggacgttctggatctctaccggttcttccgccagtagtgcggcaaaaaggataggcagagcagcatttttagcgccggaaattgtgacttcgccctggagcttcgttggcccctgaacacgaaatttatccatttagtttgttctcagttaacaattcatatccgctaccggcgaatcgcccatagctcaaaagccgttcagtttgcgatcgcgcgcccactccgcaggggtatacgctttgatcgacacagcatgaatgcggttatccgcaatatattccatcagcgggccatagaccgtctgctgttttttaacccgactcatgccgtcaaacaactcacccacggcaataacctgaaagtggctgccatcgccggaaacgtggacttcctggagggagagagcgttcatcaacacgctctgaatttcattattttccatgggatcttcaatcatcagttaataaatcagcgaaacatcttagagcaaagttgcgctggcataaataagcaaaaagcctcgctgataaatcagacaaggctcgacttgcaggcaggtttgccggacaggcggttaacgccatatccggcctgaaaaaatttaacgaggcagaacatcagcaggcaaattatacaatttcgccagggtatacactttgtcgtttaccccctgaagcgtcacattgttgccctgctttttcgccagatcgataagatggagcagcagtgccagtccacccgtatccacgcgagacacacggctaagatcgatgctggtaatccccttcaccgcttcctcacgtatttcccaaagcggtagcagaacgtcctgatccagctctccggataacgccagcgtgtcacccgtctgcatccagctcagtgactcgctcattattttttctcttccagagtgattttctgttgagaaatcgatttcagttgcgcagtcaggccgtcgatacctttggtacgcagcagcgttccccactcgttttgtttggtggtgatcatactgacgccttcagcaatcatgtcgtaagcctgccagttgcccgtctgggagtttttacgccactggaagtccagacgcaccggcggacggccattcgggtcaataatggtaacgcgaatcggcacaatggttttatcacccagcggctgttctggcgcaatctgataggtttgaccgtgatacatcgccagcgcctgaccgtaagcctgcttcaggtactcacggaaagcggcaaagtaagcatcacgttgagctggggtcgcactcttgtaatactggcccagcaccagcgcaccggcgtatttcacctgtacgtatggcaacagttcctgatcaacaatggtacgcagataatccgggttagcctgaatttgcggttgctcattcttcaggcgatcgaacgttttctgcgccgcctcgtccatcagcttatacggattggtctggtctgccgcggttgccgcactcagcggtgcaatcaccagcaaagcgaccatcattaaacgtttaaacatgcgtcggttctcctgaaattatttcgttgtacccacaggttcagtggtttcattattacctggcgcagcagctggcgcatcgccactattcttattgtcatcgtctttactaccgtaaaggaactgaccaatgagatcttccagcaccatcgcagacttggtgtcctgaattgtatcgccatccttcaggatagcagtccccagttccgggtcttcaaaaccgacgtttaatgccagatattgttcccccagcaggccggaagtacgaatgctcagcgaactggtatcaggaatgtggttataacgttgttcaatttccagcgttacgcgcggcagataggttttcgggtccagcgtaatatccgccacccggcccacaacaacgccaccaatgctgaccggagagcgggctttcaggccgccaatgttatcgaacgtcgcataaagcgtataggtcggttcagtacgtatagacgtcacgttcgctgccttcaggcaaacaaacagcgccgcaagcagtgctgctaataaaaagatacccacccaaatttcattttttttcgtttgcatgaactcaattcccaaacatcaatgcggtcagcacaaaatccagccccagaacagccagagacgagtggacaacggtgcgagtggttgcccggctaatcccggcagacgtcgggatggcgtcgtagccgttaaacaacgaaatccacgtcaccgtgatagcgaacaccacgctcttaatcagacagttgacgagatccatacgccagtcgacggcattttgcattgccgaccagaagaacccactatcaatgcctttccaactgacgccgaccagcgatccgccccagatccccacggcgacgaagataaccgtcaacagtggtaatgaaataactccagcccagaaacggggagaaataacccgacgcagcggatccaccgccatcatctccatactggagagttgctctgtagcgcgcatcaggccgatttctgcggttagcgccgaaccagcacgcccggcaaacaacaacgcggcaaccaccggccccagttcacgcagtagcgataacgccaccagcatacccagactggtttccgcactataagtggtcagaaccagataaccttgcagccccaacaccattccgatgaacacgccagaaaccacaataatcagcatcgacaggacgccgacattatagagctggcgcaccagcagcggtgcatgtttgcgaaattccggtttgccgaccagcgcattgaataacattaacccggcccgcccgaacgttctcagggttttaatccctttatgtccgagcgacgccagcgcatttaacagcatgagtggcttaactccctggtaaaagatcagcgtgataatcgccggcaggatagcggaacggaacaggcccgtcagctatcccgtccagaaactgacgtacgcgcggatcaggattcgcctgcaacgcctgggcactgccatgagcgacaatttttttgtccgccaggatccaggcgtgatccgcaatacttaacacttccggcacatcgtgagaaaccaccacacaagtcacgcccagcgcgctgttcagctcagaaatcagcttcaccagcacgcccatggtaatgggatcttgcccaacaaagggctcatcaaacatgatgagatccggctccagcgcaatcgcacgtgccagcgctgcacgccgcgccatcccaccggaaagttcagaaggcataagtttagccgctccacgcagccccacggcctccagcttcatcatcaccgtactatgcaacaatggtgcgggaagttgggtatgttcccgcagtggataggcgacgttgtcaaatacgttcatatcagtgaacaacgccccggactgaaataacatgctcatccgtttgcgcactgtatacaggcgcgaacgagacatcgccggaatattctcaccatcgaaaaggatctcaccatgatctggtgcgatttgcccgccaatcagacggagtagcgtcgttttaccgatgcccgatggccccatgatcgccgtgatcttccctcgcggcacggtcagggaaatattatcgaagatgcagcgattgccacgcgtaaaactgacatcgcgcatatcgactaaattcgccacagactgctccataattcacccttcgtcttgcgttgattttctaagcatggcgctcaatttaaccttgaacccaacatatttacagaatattacctgccgtggttagcgaaagctggcatttgttttactttttagccgcataaagtcaaaattaagaatctgttacggctttctgaaaatcttcagcggaccggcgagtatacctgaagaaaggacgttagatgcttttagctacggcactgttaattgttggtttacttttggtcgtttacagtgccgaccgcctggtttttgccgcgtctattctttgccgaacctttggcatcccgccgctgatcatcggcatgacggtggtcagtattggtacatcgttaccagaaatcatcgtctcgcttgccgcgtctttgcacgaacaacgcgatttagccgttggtacagccctcggctcaaacattatcaatatattgctgatcctcggtctggctgcgctggttcgtccttttaccgtccattctgatgttctacgccgtgaattacccttaatgttgttggtcagcgtggtggccggttccgtactctatgacggacaacttagtcgcagcgatggtatctttctcctctttctggctgtgctatggctgctgttcattgttaaacttgcacgtcaggctgaacgtcaggggactgacagcctgaccagagagcagcttgcagagctgccgcgtgaaggtggattgcccgtcgcatttttatggctcggcatcgcactgatcattatgccagtggccacgcggatggtagttgataacgccacggtgctggcgaattactttgccattagcgagttgacgatgggtctgacggcaattgctatcggaaccagcctgccggaactggcaaccgcaatagcgggggttcgcaaaggtgaaaacgacattgcggtcggaaatatcattggcgcaaacatttttaatattgtcatcgtgttgggtttacccgcgctgataacgccaggagagattgatccactggcgtacagtcgtgactacagcgtgatgttgctggtgagcattatttttgcgttgctgtgctggcggcgctccccgcaaccgggccgtggtgtaggggtattattaactggcggatttatcgtatggctggcgatgttgtactggttatcgccaatactcgttgaataactggaaacgcattatgtcgcacgtagagttacaaccgggttttgactttcagcaagcaggtaaagaagtcctggcgattgaacgtgaatgcctggcggagcttgatcaatacatcaatcagaatttcacgcttgcctgtgaaaagatgttctggtgtaaagggaaagttgtcgtcatggggatggggaaatcggggcacatcgggcgcaaaatggcagcaacatttgccagcaccggtacaccttcatttttcgtccatcctggcgaagccgcgcatggtgatttaggcatggtcaccccacaggatgtggtgattgctatctctaactcaggtgaatccagcgaaatcacggccttaattccagtgcttaagcgtcttcacgtaccgttaatctgcatcaccggttgcccggagagcagcatggcgcgcgccgcagatgtgcatctgtgtgttaaagtagcgaaagaagcctgtccgttagggctggcaccgaccagcagcacaaccgccacgctggttatgggcgatgccctcgctgtcgcgctgttaaaagcacgcggctttactgctgaagattttgcgctctcacacccaggcggcgcactgggtcgtaaacttctgctgcgcgtaaacgatattatgcatacgggcgatgagatcccgcatgttaagaaaacggccagtctgcgtgacgcattgctggaagttacccgcaaaaatcttggtatgactgtcatttgcgatgacaatatgatgattgaaggcatctttaccgacggtgatttacgccgtgtcttcgatatgggcgtggatgttcgtcggttaagtattgccgatgtgatgacgccggggggaatacgcgtgcgcccaggcattctggccgttgaggcactgaacttaatgcagtcccgccatatcacctccgtgatggttgccgatggcgaccatttactcggtgtgttacatatgcatgatttactgcgtgcaggcgtagtgtaaagattcaaggataaacaacaatgagcaaagcaggtgcgtcgcttgcgacctgttacggccctgtcagcgccgacgttatggcaaaagcagagaacattcgtctgctgatcctcgacgttgatggcgtactgtcagatggcctgatttatatgggcaataacggcgaagagctgaaagcgttcaatgttcgtgacggttatggcattcgttgtgcgctcacctctgatattgaagtcgctatcattaccgggcgaaaggctaaactggtagaagatcgttgtgccacattggggatcactcacttgtatcaggggcagtcaaacaaactgatcgcctttagcgatctgctggaaaaactggcgattgccccggaaaatgtggcttatgtcggcgatgatctcatcgactggccggtaatggaaaaagtgggtttaagcgtcgccgtggccgatgcgcatccactgttgatcccgcgcgccgattacgtaacgcgcattgctggcggtcgtggcgcagtgcgagaagtttgcgacttattactcctggcgcagggcaaactggatgaagccaaagggcaatcgatatgagtaaagccagacgttgggttatcattgtgctatcactggcggttctggtgatgatcggcattaatatggccgaaaaagacgataccgcccaggtggtcgtcaacaacaatgatcccacctataaaagcgagcatacggacacgctcgtctataacccagaaggggcactaagctatcgattgattgctcaacacgttgaatattattccgatcaggccgtttcgtggtttacgcagccggtacttaccacgtttgataaggataaaatcccgacatggtccgtaaaagcagataaagccaagctgaccaatgaccggatgctctatttatatggacacgttgaagtcaatgcactcgtgccggactctcaacttcgcagaatcacgacggataacgcgcagatcaatctggtgacgcaggatgttacctctgaagacctcgtcacgttatacggaacaacatttaactccagcggtctgaaaatgcgcggcaacttacgcagcaagaacgccgagctgattgaaaaggttagaacatcctatgaaattcaaaacaaacaaactcagccttaatcttgtgcttgccagctcacttctggccgccagcattccggcatttgccgtaaccggagatactgatcagccgatccacattgaatcggaccagcaatctcttgatatgcaaggcaacgtggttacctttaccggcaatgtcatcgtcacccagggcaccatcaaaattaatgccgacaaagtggtcgttacccgtccgggcggcgaacaaggtaaagaagtgattgacggctacggtaaaccggcaacgttctaccagatgcaggacaacggtaaacccgttgaaggtcacgcttcccagatgcactacgaactggcaaaagattttgtcgttctgacgggtaatgcttatctgcagcaggtcgatagcaacattaagggcgataagatcacttacctggtgaaagagcagaaaatgcaggctttcagcgacaaaggcaagcgcgtaaccaccgttctggtgccgtcgcagctgcaggacaaaaacaataaaggccagaccccggcacagaagaagggtaattaattcgttatggcaacattaactgcaaagaaccttgcaaaagcctataaaggccgtcgcgtggtagaagacgtcagcctgaccgtcaactccggggaaattgtcggtctgctggggccaaacggtgccggtaagaccaccactttctacatggttgttggcattgtgccgcgcgatgcgggcaacatcattattgatgatgacgatatcagtctgctgcctctgcatgcacgcgcgcgccgcggtatcggctatctgccgcaggaagcctccattttccgtcgcctcagcgtttacgataacctgatggcggtactgcaaattcgtgacgacttgtctgctgaacaacgtgaagaccgcgcgaacgagctgatggaagagtttcacattgagcacctgcgtgacagcatggggcagtcactctccgggggtgaacgtcgccgtgtagaaattgcccgcgcactggctgcgaatccgaaatttattctgctcgacgaaccgtttgccggggttgacccgatctcggttatcgacattaaacgcatcattgagcacctgcgcgacagcggcctgggcgtactgatcactgaccacaacgtgcgtgaaacactggcggtttgtgaacgcgcttatatcgtcagtcaggggcatttgatcgcccacggcacgcctacagaaatcttacaagacgaacacgttaagcgtgtataccttggggaagacttcagactctgatagggtagaagtttgcgacgttttagcaggagagtacgattctgaacatgaagcaaggtttgcaactcaggcttagccaacaactggcgatgacgccacagctccaacaggcaattcgtctgttgcagttgtcgacgctggaacttcagcaggagctacagcaggcgctggagagcaatccgctgcttgagcaaatcgacactcatgaagaaatcgacacccgcgaaacgcaagacagtgaaacactggacaccgccgacgcgctcgaacaaaaagagatgccggaagagctgccgctcgatgccagttgggacaccatttacaccgctggtacaccatccggcaccagcggtgactacattgacgacgagctgccggtctatcagggcgaaacgacacagaccttacaggattacctgatgtggcaggtcgagttgacaccgttttccgacactgaccgcgctattgctacctctatcgtcgatgccgttgatgacaccggttatctgactgtcccgctggaagatattctcgaaagtatgggcgatgaagagattgacatcgacgaagttgaagccgtccttaagcggatccaacggtttgatccggtcggtgtggcggcaaaagatctgcgtgactgcctgctgatccaactctcccaattcgataagaccacgccatggctggaagaggccagactgatcattagcgatcatctcgatctattagccaatcacgacttccgcactttaatgcgcgtcacgcgtctgaaagaagatgtgctgaaagaagccgtcaatctgatccagtcgctcgatccgcgccccgggcagtcgatccagactggcgaacctgagtatgtcattccagatgtgctggtgcgtaagcataacggtcactggacggtagaactcaacagtgacagcattccgcgtctgcaaatcaaccagcactacgcctcgatgtgcaataacgcgcgcaacgatggtgatagccagtttatccgcagcaatctgcaggatgccaaatggttgatcaagagtctggaaagccgtaacgatacgctactgcgcgtgagtcgctgtatcgttgaacagcagcaagccttctttgagcaaggcgaagaatatatgaaaccgatggtactggccgatatcgcccaggccgtcgagatgcatgaatcgacgatatctcgcgtgaccacgcaaaaatacctgcatagtccacgaggcatttttgaactgaagtatttcttttccagtcacgtcaataccgagggcggcggcgaagcttcctccacggcgattcgtgcgctggtgaagaaattaatcgcggcggaaaacccagcgaaaccgttgagcgacagcaagttaacctctttgctgtcggaacaaggtatcatggtggctcgccgcactgttgcgaagtaccgagagtctttatccattccgccgtcaaaccagcgtaaacagctcgtttgacccaaccgataaggaagacactatgcagctcaacattaccggaaataacgtcgagatcaccgaggcactgcgcgaatttgttacagccaaatttgccaaacttgagcaatattttgaccgaatcaaccaggtctatgttgttctgaaagtggagaaagtcacccacacctcagatgcaacactgcatgtaaacggtggtgaaattcatgccagcgcggaaggtcaggacatgtacgctgccattgatggcttaattgataagctggcacgccagttgaccaaacataaagataaactgaaacaacactaattgtccgggcaattagcatgtgcatggcggcctgttgtgcggcacaacgggccatttgtacggttaatgccccgagcctgttccactgtttgagtgggcaggttcttaggtgaaattatgacaaataatgatacaactctacagcttagcagtgttcttaacagggaatgtacgcgaagccgcgtccactgtcagagcaaaaaacgcgccctggaaatcatcagcgagctggcagcgaaacaacttagcctggcgccccaggtggtttttgaagctatcctgacgcgggaaaaaatgggcagtaccggtatcggcaatggtattgccattccgcatggcaaactggaagaagatactctgcgcgccgttggcgttttcgttcagctcgaaacgcctatagctttcgatgccatcgacaaccaaccggtggacttactttttgccctgctggtgccggcagaccaaactaaaacgcacctgcatactctgtcgctggtagcgaaacgtctggcggacaaaaccatctgccgccgtttacgcgcagcccagagcgatgaagagctgtatcaaatcattacggataccgaaggtactccggatgaagcgtagttattcggtaatgtctcttttagacgttgtgaggagaaacagtacatggtactgatgatcgtcagcggacgttcaggttcaggtaaatctgtcgccctgcgtgcgctggaagatatgggtttttactgcgtggataaccttcccgtagtgttgttacccgatctggctcgaactctggccgatcgagagatttctgccgccgtcagcattgatgttcgtaatatgccggagtcaccagaaatattcgaacaggcgatgagtaacctgcctgacgctttctcaccgcaactactgttcctggatgccgaccgtaataccttaattcgtcgttacagtgacacgcgccgactgcatccgctttccagcaaaaacctgtcgctggaaagtgctatcgacaaagaaagcgatttgctggagcctctgcgttcgcgagcggatctgattgtcgacacctcagaaatgtccgttcacgagctggcagaaatgctgcgtacccgtctgctgggtaaacgtgaacgtgaactgaccatggtctttgagtctttcggcttcaaacacggtatccctatcgatgcagattacgtctttgacgtgcgcttcttgccgaacccgcactgggatccgaaactgcgtccaatgacaggtcttgataaacctgtcgccgcgttcctcgaccgccacacagaagtacacaattttatctaccagacgcgaagctatcttgagctatggttacctatgctggaaaccaacaaccgtagctacctgacggtcgccattggttgtaccggcgggaagcaccgttcggtgtatattgcagagcaactggcagactacttccgctcgcgcggtaaaaacgtccagtcacgccatcggacgctggaaaaacgtaaaccatgaccgtcaagcaaactgttgaaatcacaaacaagctgggcatgcatgcccggcctgcaatgaagctgtttgaattaatgcagggttttgacgctgaagtgctgttacgtaatgacgaaggcaccgaggctgaagccaacagcgttattgcgctgctgatgttggattctgccaaaggacggcagattgaagttgaagcgaccggtccacaggaagaggaagcactggccgccgttatcgccctctttaactctggttttgatgaagattaatcttcatcactttgacattcaaatcccttcaagctcccccggcaataagaaaagcgcgtactgaaatcgttatcaatcaacatcaattgtacatttcgtgcgctttttactttcagaagaaccttaagaaaaccttaagaagcattgtttagatttcgtttaagttaatcgaccatactggagatcgtcagaaaatatttccaggagatggcatgattcgcttatctgaacaaagtcccctgggcaccggaagacatcggaaatgttatgcgcatccggaagatgcccaacgctgtatcaagattgtctaccatcgtggcgatggtggcgataaagagatccgccgtgagttaaagtactacgcgcatcttggtcgccggttaaaagactggagtggaataccgcgctatcacggtaccattgagacggattgcggaaccggttatgtctacgatgtgattgccgatttcgacggcaagccttccattacgctgaccgaatttgcagaacaatgccgttacgaagaagacattgcacaactgcgccagttactgaaacagctgaagcgttatttgcaggataaccgtatcgtgacgatgtcgctgaagccgcagaatatcctctgtcaccgcatcagtgagtcagaggttacccccgtcgtctgcgacaacattggtgaaagcacattgattccactggcgacctggtcgaagtggtgttgtctgcgtaagcaagagcggttatggaaacgatttatcgcccaaccggcgctggctattgccctgcagaaagatctgcaacctcgtgagagcaaaacgctggccctcacttcgcgcgaagcttaatcaagctggtgttgttgcataaacggctcaccgcctaactgatacatctgccgtaaaatccacgcctgacggctacgcacgtagcccgatggcgcggagactttgaaacgaagtggattaggtaatacagctgccagcaatgcagcttccgaccgggtaagtttgctcgcgggtttgtggaaataacgttgtgccgcagcttcgacgccaaacacaccgtcgccaaattcggcgatattcaggtaaaccgtcaggatacgctttttgctccagactgtttctatccccagcgttaatccggcttccagcccttttcgaacccagctacgcccatcccataaaaagagatttttggctgtctgctgagaaatcgttgaagcaccgcgaatacggttttcattgcgctcgttgtgcgccagggcttgctcaatggaagcgacatcaaagccccagtgctcaggaaatttctgatcttctgcggcaatcaccgccagtcccatccacggcgagatttgatccatactgacccagtcagaatgtgccacgtaacgaaaattgccatgcagccaggcgctgacttgccgctcgaccattactgctgagaaaggaacaggcgcaacgctaaacaacgcgatgcccccgccccagaaaatggcgaggacaaccattaaccgcagaagaaaacggcgaacgaaactaaacaccgttaagcggcttttactcattcagccagaaccagcacgcgggaaaccagcttatcaatgccgctcgccgcttctgcaatgttctgcgccagcatatatgccggggtggtgacaatcttattgtcttcatcaaccacgatatcatcgacaggacacggcacatgctccgcgcccatctcttccagcacttctgcggtatcgatatcagtaccgatggtcaaacgcagcgggaaatcgaaaattttcggcagtatcgccggtgctatacacataaaaccaagcggttttccggcctgatgcatcgcttgtgccagcgcctttaattcacggtcaacggtgcattcgctaccaagactggcaaaattgcttaaattcttcgccgcgccaaaaccccccggcacaatcaacgcatccagttcagcggcatcggcctgggccagaggacggatttcaccgcgcgttattcgtgccgcttcaatcagcacattgcgcgtttccgtcatcgcttcaccagttaaatggttgataacatcaacctgctgcttatccggtgcaaagcagaccgcctgcgcaccgctgcgtgaaatagctaacaacgtcaacaccgcttcatgaatttcagaaccgtcatagacgccgcatccgctcagaattacgccaattttcttcattgtgatcttcctttcgcaattgactgaaacacattaatttttttaataaaaatgctacgcatcacacatttaactgattcatgtaacaaatcatttaagttttgctatcttaactgcgtgcggcctgaaaaacagtgctgtgcccttgtaactcatcataataatttacggcgcagccaagatttccctggtgttggcgcagtattcgcgcaccccggtctagccggggtcattttttagtggcttttgccacccacgctttcagtacttctacgtcgtgacgccactcttctttcatctcttcaatccattcaccgacgttatcttcccaggcgggaaggtcaggagactgaatttgctgacccagctgttgcagatggcgtaaccccactgaccccgccgcacctttaattttatgcccttcctcaacaatgccttttttatcctgcgccgtcagattcgactccagcacgctgacatagcccggcatcattctctcaaacaccgctaacccgtcggtgatcagcttcggtcctacaagttcgagatactgttccagcatgggaatatcgagcaatgcttctgatttactgttctcttctgtcgtcaccgtactctcctcatcatcctgggtatcccagaatttcttgatcatcgcggttagcgccggaacagaaagcggcttactcagcacatcatccattccagcattgaggtactcttgtttgtctttcagcacgttagcggttaaggccaccagcggcggtaaatcctcgcgcggataacgcttcgtcagtgcacgagagatatccaacccggtcatatctggcaactgaatatccagcaacaccaggtcgtattcgcccggtttaaacatctccagcgccgccttgccggtcatggcgacatcaacgctgttacctaacttttccagcacagagcgcgcgacaatcacgttcagttcaatgtcttccaccagcagcacattcagcgccggtaaaggcatatcgtcttcatcaaacgcatcatcaacctcttctgctaccgacggtgcgtggatcgtcaacgtaaaggttgaacctttgccctgttcgctggtaaccgtaatatcgccgcccatatttttcgccagacgacgagaaacggccagaccaataccggtgccggtggcaggtttaccgccatgactgtctttcacctggtaatacatggcaaagattttatccagctcatcctgcggaatgccgataccagagtcttccacttcaaaatgcagcatatcgccttcatcgtagcgcacgcgcacggtaacctggccttgctgagtgaatttgacggcgttactgatgaggttccacaagatctgccgtaaacgcgtcccgtcggtaatgacctgatgcggtaatggcagcgtcggctccagattaaagcgcaatcctttttgttgcgcctgcaatgcggagagattttccagatcggcaaggaagctggtgaaatcaaccggttgattatcaagctggaccttgcgccgttccatcttatccatgtcgataatatcgttgaagatattccccagcgtgacagccgaaacatggatggttttgagatatttttcctgctcggcggtgagttcagtatccagcagaatgcggctcaggccgacgataccgttcagcggtgtacgcaattcgtgactgatggtggagataaacgtcgttttgtcgcggctggcgcgttcaagcgcatcctgataccgcttacgctcggtaatgtcgcgaccaaagcccatcaaaccgtgacgtttacccacgcggtcgtagtacggtactttacggatttcaaagcaggctttgcgtccgtcgggataatccagccactgctcataggtcagtgacacattatgacggaacactttttcatcggtttcaatgactttcgcagcggcttccggtgagtaaacatcagcaggtttcaggtgaaccagttgtttttcgctttttccggtcagcagctccatcgcgcggttacagccggaaaactctttatcttcgttacgataaaaaaccaggtcgggtgaagcgtcaaggaaggaacgtaagaatgaggattgctgctcgagctgaatttgtgtctcttcgcgctctttgatttcaattttcagttggccgaaggtttcctgcagttctgcttccgctttttcacgaacggcgatttcctgatttagctgggcaatattatcttttaactgaacgttgaggctcaaatcgcgctcgcgcatctcctccagtttttgcaccagtcgtgacagacgttgtcgtgactcctccagttgctcgacgaccaccgatagaaagtagaccgcccacggcgtaatcagcaaaccaaagaagatagaacgaataacatcaatgctttcgacctggccatgcagcaccatggttaccgccatttgtaccacaatggcaagaacgacgagggccagcgccagcaacattgagaagcgcaccagacctaacttcatcatcaggtcaacataatactgcgccagcagacgaatttgcttcattagggaattccttcacgacaacctgccccaataatacccaattctgacagttacgttataaattgtgtgagaaatgcggaattcccctcaatggcctacgccgttggaggtagccacggacgtcccagcgccgatccctgtacgccatgttcattcagataacgatccagcccgaccattcccgtccatcgattttcgcaccacagcggagcaagcagcgtcgggcgacgggcgctggcggaaatgcgatggtagatcacttccggtggcgtatggcgaatcatttctccggcagtgagcgtgtaatcctccagttcaattccgttcaaacgccccgcttcccaggctttcgccataatgctgcctttcactatatgcagcggatgcagctttatgccgtccacgccggtttcaaccactcgctccagcgtttgcaaacattcagcctgcccttcgccaggcaggccaacaattaagtgagaacacaccttcagcccgcgctcacgcgccagctgcgtcgtgcgctgatagcaggcaaaatcatgaccgcgattgatgcgatgcagtgttttgtcgtgggcggtttgtagccccagctccaaccacacttcgtagccctggtccttatattcgcaaagcaaatccagcaccgcatccggcacgcagtccgggcgggtaccaacacacaaaccgacaatattggcctggctcaccgcctgctgatacatcgaacgcagcacctgaacttccgcaaaggtgctggtatacgcctgaaagtaggccagatagcgtttagcgcggttaactaaattcgcctggtgcgccagttgctcggcaatggaacgatgctgctgcgcttcatcggcaaacgaggcaacattacagaatgtgcagccgccacgcccgatggtaccgtcacggttagggcagctaaaaccgccgtgcagcgtcagcttatgcaccttttgcccataacgacgggtgagatcaccaccaaacatattgactaatttctgtaactgcataatctgatagaccgcgccttgaaaagaggccaaagcctgccatttttagcccaattcggcgatgacctggatcaatcgtcccggcctgcttttataaactgcataatcaatcaaaattaccgaaatttcatgcacaatcacataaatcacttttgcttatcttgtgtcagatttttttatctccttatggattttaggcaaaaacagtagcatgaaacgttattaccaattaaggcagtataaaatgctggttttctcgtcagttcaaggcaggataagggttaacacgcctttatgacagtcaggtattggctgtttctctaacgacgccccttttagccttaaatagaaaatccaatttaatttcagataattaataaagaattttgcgctaaagcacatttctgtaccaataagcttgccatttgacctgtatcagctttcccgataagttggaaatccgctggaagctttctggatgagcagcctgctcatcatatttatgcagtaattgagatcccctcttcaccgtattaaccgatgcgaaaaggacaacaagggggcgaatgcgaggtgcgcgtatgacacgcaaaccccgtcgccacgctcttactgtgcccgtgcgcagcggttcggaagtggggttcccgcagagcctgggggaggttcacgatatgttgtacgataaatcccttgagagggataactgtggtttcggcctgatcgcccacatagaaggcgaacctagccacaaggtagtgcgtactgcaatacacgcactggcccgcatgcagcaccgtggcgcgattctcgccgatggtaaaaccggtgacggttgcggcttgctgttacaaaaaccggatcgtttttttcgcatcgttgcgcaggagcgcggctggcgtttagcaaaaaactacgccgtcgggatgctcttcctgaataaagatcctgaactcgccgctgccgcacgccgcatcgttgaagaagagctgcaacgcgaaacgttgtcgattgtgggctggcgtgatgtccccactaacgaaggcgtgctgggtgaaatcgccctctcctctctgccacgcattgagcaaatttttgtgaacgccccggcaggctggcgtccgcgcgatatggagcgccgtctgtttatcgcccgccgccgcattgaaaagcgtctcgaagccgacaaagacttctacgtctgtagcctgtcgaatctggtcaatatttataaaggtctgtgtatgccggcggatctgccgcgcttctacctggacctcgctgacctgcgtctggaatcggccatctgcctgtttcaccagcgcttttccactaacaccgtaccgcgctggccgctggcgcagccattccgctacctcgcgcataacggtgaaatcaacaccatcaccggtaaccgccaatgggcgcgtgcgcgtacctataaattccagacgccgctgatccctgacctgcacgacgccgcgccgttcgtcaacgaaaccggctctgactccagttcgatggataacatgctggaactcctgctggcaggcgggatggatatcatccgtgccatgcgtctgttagtgccaccagcctggcagaacaacccggatatggacccggaactgcgtgccttctttgactttaactccatgcatatggagccgtgggatggcccggcagggatcgtgatgtccgatggccgtttcgccgcctgtaacctcgaccgtaacggtctgcgtccggcacgctacgtcatcaccaaagataaactgatcacctgcgcctctgaagtcggtatctgggattatcagcctgacgaagtggtcgaaaaaggccgcgtagggccaggcgaactgatggtgatcgacactcgcagtgggcgcattctacactcggcagaaaccgatgatgacctgaaaagccgccatccctataaagagtggatggagaaaaacgtccgccgtctggtaccgtttgaagatctgcccgatgaagaagtgggtagccgcgaactggacgacgacacgcttgccagctaccagaaacaatttaactacagcgcggaagagctggattcggtgatccgcgtactgggtgaaaacggtcaggaagcggtcggttcgatgggcgacgacaccccattcgccgtgctctccagccagccgcgcattatttacgactacttccgccagcagtttgctcaggtaaccaacccgccaatcgacccgctgcgcgaagcgcatgttatgtcgctcgccaccagcattggccgcgaaatgaacgtcttctgcgaagcagagggacaggcgcaccgtttaagctttaaatcgccgattctgctctactccgatttcaaacagctcacgacgatgaaagaggatcactaccgcgcagatacgctggatatcacctttgacgtcactaaaaccacgctcgaagcgacggtgaaagaactgtgtgacaaagccgaaaaaatggtacgtagcggcaccgtgctgctggtgctctccgaccggaatatcgctaaagatcgcctgccggttccggctccgatggcggttggcgcgatccagacccgtcttgtcgagcaaagcctgcgttgcgatgccaacatcatcgtagaaaccgccagcgcccgtgatccgcaccacttcgccgtgttgctgggcttcggtgcgacggctatttatccgtaccttgcctatgaaacgctgggccgcctggtagacacccacgcgattgccaaagattatcgtaccgtgatgctcaactaccgtaacggcatcaacaaaggcttgtacaaaatcatgtccaaaatgggcatctccaccatcgcctcttaccgctgctcgaaactgtttgaagcggtcggtctgcacgatgatgtcgtaggcctgtgcttccagggcgcggttagccgcattggcggggcgagctttgaagacttccagcaggatctgctgaatctgtcgaaacgtgcctggctggcgcgtaagcccatcagccagggcggcttgctgaaatacgtgcacggtggcgaataccacgcctacaacccggacgttgtgcgcacactgcaacaggcggtacaaagcggcgagtacagcgactatcaggaatacgcgaagctggttaatgagcgtccggcaaccacgctacgcgatctgctggcaattacgccgggtgaaaacgcggtcaacattgctgatgttgaaccggcaagcgaactgtttaaacgcttcgataccgccgcgatgtctatcggcgcgttaagcccggaagcccacgaggcgctggcggaagcgatgaacagcatcggcggtaactcaaactccggcgaaggcggtgaagacccggcgcgctatggcactaacaaagtgtcgcgcatcaagcaggtggcgtccggtcgcttcggcgttactccggcgtacctggtcaatgctgacgtgattcagattaaagtcgcccagggcgcgaagccgggcgaaggcggtcagttgccgggcgacaaagtcactccttacatcgccaaactgcgctattcggtgcccggagtgacgctgatctccccgccgccgcaccacgatatctactctatcgaggacttagcgcagctcattttcgacctcaagcaggttaacccgaaagcgatgatctccgtgaagctggtgtccgaaccgggcgtcggcaccatcgcgaccggcgtggcgaaagcttatgcggacttgatcaccatcgcaggctatgacggcggcaccggcgcaagtccgctttcatcggtgaaatacgcaggctgtccgtgggaactcggcctggtggaaacccaacaggcgctggttgccaacggtttacgtcataaaattcgtttgcaggttgatggcggcctgaaaacgggcgttgatatcatcaaagcggcgattctcggcgcagaaagcttcggcttcggcactggcccaatggtcgcgctcggttgtaaatatctgcgaatttgccacctgaacaactgcgccacgggtgtagcaactcaggatgacaaactgcgtaagaatcactatcacggcctgccattcaaggtgacgaattactttgaatttatcgcccgtgaaacccgcgagctgatggcacagctgggcgtaacacgtctggtggatctgattggtcgcaccgacctgctgaaagagctggacggtttcaccgccaaacagcagaaactggcgctgtcgaagctgctggaaactgccgagccacatgcaggtaaggcactctactgtaccgaaaacaacccgccgtttgataacggcctactgaacgcgcagttgctgcaacaggcaaaaccgtttgttgatgaacgccagagcaaaaccttctggttcgatatccgcaacaccgaccgttctgtcggcgcatcgctttcaggctatatcgcccagacgcacggcgatcaggggctggcagccgatccgatcaaagcgtacttcaacggcaccgcaggccagagcttcggcgtgtggaacgcgggcggcgtggaactgtacctgaccggtgatgccaacgactatgtcggtaaaggcatggcgggtggcttaatcgccattcgtcctccggttggctcagccttccgcagccatgaagcaagcattatcggcaacacctgcctgtatggcgcgaccggaggtcgtctgtatgccgcaggccgcgcgggtgaacgtttcggcgtgcgtaactccggtgctatcaccgtggtagaaggcattggcgacaacggctgtgaatatatgacgggcggtattgtctgtattctgggtaaaaccggcgttaacttcggcgcgggcatgaccggtggcttcgcttacgttctcgatgaaagcggcgatttccgcaaacgcgttaacccggaactggtcgaggtcttaagcgttgacgatttggcgatccatgaagagcatctgcgtggtcttatcaccgagcatgtgcagcataccggttcccagcgcggtgaagagattctggcgaactggtcaaccttcgccacgaaattcgcgctggttaaaccgaagtccagtgatgtaaaagcactgctgggtcaccgtagtcgtagcgcagcagagttgcgcgtgcaggcgcagtaaggggtagcaacaatgagtcagaatgtttatcaatttatcgacctgcagcgcgttgatccgccaaagaaaccgctgaagatccgcaaaattgagtttgttgaaatttacgagccgttttccgaaggccaggccaaagcgcaggctgaccgctgcctgtcgtgcggcaacccatactgcgagtggaaatgcccggtacacaactacatcccaaactggctgaagctcgccaatgaggggcgtatttttgaagcggcggaactgtcgcaccagacaaacaccctgccggaagtttgcggacgtgtctgcccgcaagaccgtctgtgcgaaggttcctgcaccctgaacgatgagttcggtgcggtgaccatcggcaacattgagcgttatatcaatgataaagcgttcgagatgggctggcgtccggatatgtccggcgtgaaacagaccggtaaaaaagtagcgattatcggcgcaggtccggcgggtctggcgtgcgcggatgtcctgacgcgcaacggcgtaaaagcgatcgtcttcgaccgtcacccggaaattggcggcttgctgaccttcggtattccggctttcaagctggaaaaagaggtaatgacgcgccgccgtgaaatcttcaccggcatgggtattgaattcaaactcaataccgaagtgggccgcgacgtgcagctggacgatctgctgagtgattacgatgccgtgttccttggcgtcgggacttatcagtcaatgcacggcgggctggaaaacgaagacgccgatggcgtgtacgcagcactgccgttccttatcgccaacaccaaacagttaatgggctttggtgaaacccgcgacgaaccgttcgtcagcatggaaggcaaacgcgtggtggtccttggcggtggcgacactgcgatggactgcgtgcgcacgtctgtacgccagggggcaaagcacgttacctgtgcctatcgtcgtgatgaagagaacatgccgggttcccgccgcgaagtgaaaaacgcgcgggaagaaggcgtagagttcaaattcaacgtccagccgctgggtatagaagtgaatggcaacggcaaagtcagcggcgtaaaaatggtgcgcacagaaatgggcgaaccggatgccaaaggccgtcgccgcgcggagattgtggcaggttccgaacatatcgttccggcagatgcggtgatcatggcgtttggtttccgtccacacaacatggaatggctggcaaaacacagcgtcgagctggattcgcaggggcgcattatcgccccggaagacaacgacaacgctttccagaccagcaacccgaaaatctttgctggcggcgatatcgtccgtggttccgatctggtggtgaccgctattgccgaaggtcgtaaggcggcagacggtattatgaactggctggaagtttaagcgaggtaacaataaattcgccagacagtgtctggcgaatttataaaacgagcgatccaactaaattttaagccattaaatcagccttaatcttcactaccacctttttaatctcaccaggttcgccaacaacgcatcccggtttatgcggttctcctggcataaacacggcgaacattcccggtttcaggatgatggcttgctcgttttcaatggcgctgcaaagctgataatcatcttcatggtggaactcttcacactgacgcgcagtgcctgccatgccaaacagaatccgttcctcaccgtttaataacagctggatatcaatgtattgttcgtgcaattcggcttttttctcaacaggcgattgagtattaaatgtcatgacattcataaagatattgtcgccctgtaattcgtaacggccaggcgctttttcttgcggtctggcagctaatgccaacgttaacgcgtcctgtaacgcaggatgtaatccggcagacggtaatgactgtacttcacccatcatcataatatttctccctgggccaacagcgcagccccaagtaaacctgcatcgtggcggtagtgcgccgccagtaaatcaacatgaaatgccgctggctcctgcgccagatacgtttccaccagcgccagatacccttctgccagaccaacgctgccaccgaccaccacgcactggcaatcagttgtggctttaatatcagcgatcagccttgcaagcgtacgtgcggagcggtgaatcagttgctgcgcctgctcatcaccctgcccggcgcgcgtgaaaatagttttcgcattcgcaccagccaactccccctgcgctgccgttgcaatgccgcgaccagaagcaatcgcttccacgcaacctgtgcgtccacagccgcagactggaccatgcggatcggcaagcgtatgcccgatatgccccgccagaccgccagggccggtacgcagtttaccgccgctcactacaccgccgccaacgccggtggaaacagtgataaacaccatatcggttatatcgccatccagcgcctgatactccgcccatgctgcggcctgcgcatcattaatggcaatggtcggcaaattggtaagttgctccagcgttttgactaacggaaagtgtaacaatccaccgagattatgcggattcagcgccagcaagctgccgtcgcgaataattccggttgaagcgatggcaacccgctgcgcatgtgcttgcaacggagagactaatgcggataaggcatcacgcagcgcctgcggagtctggctggcaggcgtaggaagttctcggcgatcgcggatctgcccgtcagcgccaatcagcgcggcggcaagtttagtaccgccgatatcaatcgccagtgtggtcatagcaccgcctttttcatcgctgtgttgtaccactgacaaatgtgttcaagacgcgtaatggcagaaccgaccgtcaccgcccacgcgccgtggcgcatcgcatccgccgcctgagcaggcgtgttgtaacgcccttcggcaatcacccggcatccggcgtcgctcaacgttttcaccagcgccagatccggctcttctggcgtttcaggcgtggtatagccagaaagcgtagtgccaataatttcggctcccagcttttggcatgccaggccgtcttccggcgttgagcagtcggtcatcgccagtaaaccgtgatggtgaatacgtgccagcagcgtttcaacaggtaccggacgcggtcggtcggtgccgtcaatggcgataatgtccgcgcccgcctgcgccagcgcatcaacatcttcaatataggccgtgatgcgtaccggagaatcctccagatcgcgcttcacaatcccgataatcggcacgctcaccaccgcacgcgtggcttgcagatttgccacaccttcaatacgaatggcgaccgcgcccgcctgctctgccgctaatgccatggcggcgacgatttcgggtttatcgagcgggctgtccggaaccggctggcaggagacaatcaggccaccgttagcagcgattttttgatccagttgtgcaagtaacgacatacatcttcccttagcgaaaggcccggtacagagaccgggcaacaggattaacttttggttttgactaaatcgtttttggcgctgccaaacggcacggcaccgctaaatggtttgccgtcgatagcgtcatgagtacgcaatgcttccgggcgcagccaacgctgaacacgagaaggcatatccaaaccaatcagcaggatcaccacaaacgttaaactaaacgagagcgagccaagtgccgttcccagatccagacgttgagcgatcaacgcgccgaggattggagctagtgcaccgcccagtgcgccaacgttgtaggtaaagcccagccccgctgcacgctggtcggtatcgaaataaccgccgatcagtttcggtaaaatccctgagatgccctgaccaagcatttgctggaagaacagtaacagaccgagcacccagacgtttgcgccgccaatcgcaaataccggaataatcagcagctgcgaggccagcagactacaaacgtacgctttgcgggttcccagccagtcaccgaggaagccaccgacgcagcaccccaccgccgcgccaaagccactaaagaacagcacattggcgacagtatgcgggtcataagccagatcggttttcagatacgttggcagcagcgcctgaatcggccatgagtagaggaaagcaaacaacacgaccaccatcagcattacgcccgttggccagcgtttgcccgtactttgcaccataaagctgataaagattgcggcgcataacagcccgagtacagcgacgatcgcggcattttgcaggttaccggcgaagcagaaccacagcgcagtagccgccgccagtgtcattacgatattggcaatgcgatgttcaccacggtagagaatgtctaccatcgtgcgtaccggtgctttacccccgtgtttctctttccagtcttccgcttccgggatgtttttacgcagccagagagcaaagatgattggcaaaatgccgataaagaacagcgcacgccagccccagaccggaaccaccaggctatagacctgagcggcaacgacggcccccactgagaagccggaaatcagaaaaccactggctttgttacgcagatgctttggccagctttcaatgacataggtggcgctggaaccgtattcacccgccatccccatgccgatgaccagacgagcgataaacatggtgatgtagcctggcgcaaagccgcaggccagcgtcccggccgagaagagaacgatgctggtgaccattgccagacgacgcccgtagcggtcacccatagcgccgagcatcaggccgccgaaccagcgagagataaaggctgcggagatcagacttgccgcctgcaccgtcgtgagcccgaattcaccctgtacttcggtgagtaccagggcgattaaaacgaaatcaaaaccgtcaagcagatatcccaaccaggcagcggaaaatgcccgccattgtgcgcggttaagatggcgataccacgggatattctgggttgtagtactcattgtgagtctcccgcggtgggcgatgcccacacgctttggtatgaaaattgtagggtacagatgcgtttatttcccctcacccggtaggggcgagcgaggggaaacaactcacccgcgctcttgcatcaactgctgggccagcgccttcagttctggcagatatttttcatctaccggaccaaacggtttgcggcacagcggcacagaaacgacatccatataatgcaggacagttttcaggccgcggaatacgccagttttgatcagtaaatcaatgactttgttgcactcagtttgcagtttctgcgcggtctggatatcgccttctttcagcgccttcacgatcccctgataacgccagcccatgatgttgtaagtgctgccgataccgccgtctgcgcccgccagaagaccagaggcgaagatttcgtcgtaaccgttatagagcaccagatcaggatgttcacgacggatctgctccatctgatagagatcgccagaggtctgtttcagcgcacctacaccaggcagcgtaaccagggtgttgatctgatccagggtcagttttaccccgctcagggctggaatgttgtacaccaccatcggcaacccatccgccgaatcaataattgcccgatagtgatcgcagtgttcttcaaagctgaaaggatagtagaacggcgtgacggcggagacggcatcgaagccataacgtttagccgatgccgcaagttgttggctttcggcggtgctgacgcaaccgacgtgggcgatgagtttaatcttacctttcgcctcttcagcgacgatttccagtacctgttcacgctctgaaaggctctgtacaaaggcttcgcctgtcgaaccccccacgtacaaaccgtcgatgccctgctgaatattgaactgaaccaggcggcgcagactcgctttatccagtgcttgttgttggtcaaaaggagtcaggagtgcagccattacgccacgtaaattcgttgccataaatacctctgaagtgatgcttgtctgataaacgatatacctttatacctgttataccagatcaattaagcaacaccccatacagaaagcttataatgcgatctgcttcactaaagtggcattatttctttttgttggtggtctgaccgaaggcgtgccaggtagcagagacgctgttgagatgcgattgcaacgcgcgatcggcttcgtcaggatcatgacggcggatcgcgtcaacgatcgcaatatgctgttgatagctaacgttgttatgctcatgcagagcctgatcggccacggttggacgtgcggcgattagccagtcgagcagggcaacgtggatcgccatgaagattgggttaccagggatctccgccagaacgcggtggaaatcaacgtctgagcgaatgaatgccgcgttgttatccagcgactgactgttgatttccagtgcttttgccagcaaatcgatttgctcatcggtggcgtgttcagccgcatagcgcaccaggctggattcaaagaacagacgtaattgttcgaaatgggcaatcccaccaggatgagaaaggaaatctttcgccatgccggaaagctcgccgatgatggtgtccgcagaaggacgtgagacgcgggcacgttcgccgttgtttatttgcaccagacctttgcgttttaacgctgccagcgcttcgcgcaccgaaggacgcccgacgttaaagaacgccatcagttcgcgttcagacggtaattgttcaccttcgccaaattcacgacggcggatcatctgttccagctcttcttccaccatttcggagagttttttacgcgccagcgggcggctgcgcaagttgcgcccgatagtggtagtagaatcttcagcttgcggatcaaatgcgttcataggactcattcaggaaaatgcgttagcggataataacgacgctatcgtagcacagtatcaaagtcaggcgaaaagatgacagatagcaaaacaggccacatgggcctgttttcattttacttcacaacgcgtaatgccggtcgaccaccgcgtggtggctgcggaggttcatcgtcaggatgagtttcatcatcgtgatctggcttgtcgccatcgataaccgacataacggtttcgttgtctgccgatgcctcttcatcattcatgatgctggcatcttcatcgtaggcagcttcaggctcaaacatcgtgcctgcaccattttcacgggcgtagatagccagcacggcagccagcggcacagaaacctgacgcggaatgccaccaaagcgcgcgttaaagcgcacctcatcattcgccagttccagattgccgacagcacgcggcgcaatgttgagtacgatttgcccgtcacgcgcatattccataggaacctgcacgcctgggagcgtcacatccaccaccaggtgcggcgtgagctggttatccagcaaccactcatagaatgcacgcagcagatagggacgacgtggtgttagctgtgacaaatccatacagattaactccggcccagacgcatttcacgttctgcttcagttaaagaagcaaggaaagagtcacgttcaaagacgcgggtcatatagcctttcagctctttcgcacccgggccgctgaactcgatgcccagttgcggcagacgccacagcagaggagcaaggtagcaatcgaccaggctgaactcatcgctcaggaagtacggcttctgaccgaagaccggcgcaatcgccagcagttcttcgcgcagttgcttacgtgcggcatcggcttcagaagctgaaccgttgatgatggtgttcatcagcgtgtaccagtctttttcgatgcgatgcatgtacagacggctttcaccgcgagctaccgggtaaacaggcatcagtggcggatgcgggaaacgctcatccagatattccataatgatgcgagattcccacagggtcagctcacgatccaccagggtcggaacgctctgattcgggttgaggtcaatcagatcctgaggcggattgtccttttccacgtgttcgatctcgaaacttacacctttctcagccagcacaatgcggacctgatggctatagatgtcagtaggaccggaaaacagcgtcattaccgaacgtttgttggcagcgacagccatgaaaacctccaggtatagtcagaatttttactgctaccagccaccaggtggccagtcagaagttgtgttacccagtaaggaacgactctctttgttcgaaaatcaaacaaaaaatgagcaatacccgacatttgggcagaaaattggatgatagtttaccagattttgcgacctttgtggtgagtcgatgccggaaatggggaaaaagagatgcgctttagtctgaaatagttgacttagtcccttattggcgatgtggtttttgttttacctgtctgtcaggtggcagcaaaaagcaactttccattttttacgctgatgcagattttagccataaaaaaacccgccgaagcgggttttttcgcaaattgttttctgccggagcagaagccaattaacgtttggagaactgcggacgacgacgtgctttacgcagaccgactttcttacgttcaacctgacgagcgtcacgagtaacgaagccagctttacgcagttcagaacgcagggactcgtcgtattccatcagagcgcgggtgataccgtgacggatcgcaccagcctgaccagagataccaccacctttaacggtgatgtacaggtccagtttctcaaccatgtcgaccagttccagcggctgacgaactaccatgcgagcagtttcacgaccgaagtactgttccagagaacgttggttgattacgattttaccgttgcccggtttgatgaaaacgcgagctgcggaacttttgcggcgaccagtgccgtagtattgattttcagccattgcctataatcccgattagatgtcaagaacttgcggttgctgtgccgcgtggttgtgctcgttacccgcgtaaactttcagtttacggaacatagcacgacccagcgggccttttggcaacatgcctttaaccgcgatttcaatcacacgctcaggacggcgagcaatcatctcttcaaaggtcgcttgtttgataccaccgatgtggccggtgtggtgatagtacactttgtcagtacgcttgttgccggttacagcaactttgtcagcgttcagaacgatgatgtaatcaccggtatctacgtgcggagtgtattccgctttgtgcttaccgcgcaggcgacgagccagttcagtagccagacggcccagagttttaccggtcgcgtcaacaacataccagtcgcgttttacggtttctggtttagctgtaaaagttttcattaaaagcttacccaataaatagttacacgttggtgaacacccaaacgtcttcaattgttgaggttcacacgacaaagtccggcaaacctaccccttcgaatagcctatgccagcacacaaaaagtttcgggaaaaaaaactttcttgtaacgtggggtcgcaggattatagagaagtcggggtcaaagatcgacccctttttgtgatttgtggcaggttttaccccgccaaatgctcgcgcttcaaatactcttcgctttgcatctcttgcagacgtgacaggcaacgctggaactcaaacttcagccgctcgccctgataaatttcatacagcggcacttctgcactcaccactaatttgacatggcgctcgtaaaactcatccaccagcgcaataaagcgccgcgcttcgctctccatcaaccgcgtcataactggtacatcaaacaacatgaccgtgtgaaagaggcgtgagagcgcaatatagtcatgctgactgcgggcatcgacgcacaaggtagtaaaagaaaccgccagcgtctggttctcgacgcccattgtcgccaatggccgatggttgatttctaacgtcggtgaattttctcgtttcgcccccgccagcgccaaccatagtttatccatttgcgtccgggtttcatcgttgagtggcgaaagccacagatgcgcctgagtgagtgtacgcagtcgataatcaacaccagcgtccacgttcattacatcacaatgctgtttaatggcatcgattgcaggcaaaaaacgcgcacgttgcaggccatttcgataaagttcgtccggcggaatatttgacgtcgctaccagggtaataccacgggcgaacagggctttcatcagaccgccaagtagcatggcatcggtaatatcagaaacaaaaaattcgtcaaaacagagcacgtcagtttctgctttaaagcgatcggcaataatttccagcggatcgctttggccttgtaattcggtcagctcatcgtgcacccgcagcataaaacgatgaaagtgcaggcgctgtttccgctctcccggcagactttgatagaaaaggtccatcagccaggttttcccgcgtcctacaccgccccacatatataagccacgcactggcatatgctttgtgtcttcgcgtttaccccacagcttaccgacccgcgccattagcccactcgtcctgggggctggtggcgtgctattgatgagttcctgataaataatttccaggcggctgacggcctctttttgaacgtcgtcgtgttgatggctgccttcattgagcgccttcaggtattgcgatgttggggtaacgctttgcatgatcttattgttattccttgaataatcggtgcgccgttgttcacggttgacgaaaaaaaggccgttctacactacgcgatatgcagtcgggattccacttctgtggaattaacggttatagtggcataatcagccgcaggcatggagcctgaagccaacaccctacggaaacaaaagacaacgggagatgttcatgacctgggaatatgcgctaattgggttagtcgtcggcatcattattggtgctgtggccatgcgttttggtaatcgtaaactacgccagcaacaggcgttgcagtacgaactggaaaagaataaagctgaactggacgagtatcgcgaagagctggttagtcactttgcccgcagcgcggaattactggataccatggcgcacgactatcgccagctgtatcagcacatggcgaaaagctccagtagcctgctgccggaactgtctgcggaagcaaacccgttccgtaatcgtctggcagagtctgaagccagcaacgatcaggcaccggtgcagatgcctcgcgactattctgaaggcgcatccggcctgctgcgtactggcgcgaagcgcgactaatttatttttcgggcgcagccattgcgccctcctcttctctccctccccgactatcatttaatctggtgtctcattgttagccgtctgaaaattcaataacatcaaactgttttgaatctcttttcttatcattcaggtacgagagcaggaataatgaaaaaacaaacccagctgttgagtgcattagcgttaagtgtcgggttaactctctcggcgtcatttcaggccgtcgcgtcgattccaggccaggttgccgatcaggcccccctccccagtctggctccaatgctggaaaaagtgcttccggcagtggtgagcgtacgggtggaaggaacggccagtcagggacagaaaatcccggaagaattcaaaaagttttttggtgatgatttaccggatcaacctgcacaacccttcgaaggtttaggctccggtgtcatcatcaacgccaataaaggctatgtgctgaccaacaaccatgtgattaatcaggcacagaaaatcagtattcagctcaatgatgggcgcgagtttgatgcaaaactgattggtagcgatgaccagagcgatatcgccctgttgcaaattcaaaacccgagcaaattaacgcaaatcgctattgccgactccgataaattgcgcgtcggtgattttgccgtggcggtcggtaacccatttggccttgggcaaaccgccacctctggcattatatccgcattaggccgcagcgggttgaatcttgaaggtctggaaaactttatccagacagatgcttccattaaccgcggtaactccggcggtgcactgttaaaccttaacggtgagttaattggcatcaacactgcaatccttgcgcctggaggcggtagcgtcgggattggatttgccattcccagtaatatggcgcgaacactggcgcagcagcttatcgactttggagaaatcaaacgcggcctgttaggcatcaaaggcaccgagatgagtgccgatatcgccaaagccttcaaccttgacgtgcagcgtggcgcgtttgtcagcgaagtgttgccaggttctggctcggcaaaagcgggcgtcaaagcgggcgatattattaccagcctcaacggcaaaccgctgaatagctttgctgagttgcgctctcgtatcgcgaccaccgagccgggcacaaaagtgaagcttggcctgctgcgtaacggcaaaccactggaagtagaagtgacgctcgataccagcacctcttcgtcggccagcgctgaaatgatcacgccagcgctggaaggtgcaacgttgagcgatggtcagctaaaagatggtggcaaaggtattaagatcgatgaggttgtcaaaggaagcccagctgctcaggctggcttgcaaaaagacgatgtgatcattggcgtcaaccgcgatcgggtgaactcgattgctgaaatgcgtaaagtgctggcggcaaaaccggccatcattgccctgcaaattgtacgcggcaatgaaagcctctacctactaatgcgttaatgtcgtaaaccgggcatcaggctgacgtgtgatgtccggttaactcgtggtatgctgctgccgttcccttttttaacgatgcctccatcatgtttgtgaagctcttacgttccgttgcgattggattaattgtcggcgctattctgctggttgccatgccttcgctgcgcagccttaacccgctttccactccgcaatttgacagtaccgatgagacgcctgccagctataatctggcggttcgccgcgccgcgccagcggtggttaacgtttataaccgcggtttgaacaccaactctcacaaccagcttgagatccgcaccctgggatctggtgtaatcatggatcaacgcgggtatatcatcaccaataaacacgtgatcaacgacgccgatcagatcatcgtcgccttacaggatggacgtgtttttgaagcgttactggttggctctgactctctaaccgatctggcggtgctgaaaattaacgccacaggcggtttaccaacgattccgatcaatccacgccgcgtaccgcacattggcgatgtggttctggcgatcggtaacccgtacaacctcgggcagaccattacccaggggattatcagtgccacgggtcgaatcggtctgaacccgaccgggcggcaaaacttcctgcaaaccgatgcttccattaaccacggtaactctggcggcgcgctggtgaactcgctgggcgaactgatgggcattaacacgctgtcgtttgataagagtaacgatggcgaaacgccggaaggtatcggctttgcgattcctttccagttagcgaccaaaattatggataaactgatccgtgatggccgtgtgatccgtggctacattggcattggtggacgtgagatcgccccattacatgcgcagagtggcggcatggatcaactgcaagggatcgtggttaacgaagtgtcgcctgatggcccagcggcaaatgcaggcatccaggtcaacgatctgattatctctgtgaataacaaacccgctatttccgccctggagacaatggatcaggtcgcggaaattcgccctggttcggtgatcccggttgtcgtgatgcgtgacgataaacagttaacattgcaggtcaccattcaggaatatccggcgaccaactaaggtcagcgtaaaaaaacaaaaaccggagtctgtgctccggttttttattatccgctaatcaattacttattaacgaactcttcgcccagggcgatatctttcttcagcgtatccagcataccttccagcgcgttctgttcaaatgcgctcagagtaccgatagatttacgctcttccacgccgtttttacccagcagcagcggttgagagaagaaacgagcgtactgaccgtcgccttcaacgtaggcacattcgacaacgccttgttcgccctgcagtgcgcgaaccagagacagaccaaaacgtgcagctgcctggcccatagacagggttgcagacccgccaccggctttcgcttcaaccacctcagtacccgcgttctggatacgtttggtcagatcagccacttcctgctcggtaaaactaacgccaggaacctgtgacagcagcggcagaatggtaacaccagagtgaccaccaataaccggcacttcaacttcgcctggctgtttgcctttcagttccgcaacaaaggtgttggaacgaatgatatccagcgtggtaacgccgaacagtttgtttttgtcataaacaccggcttttttcagcacttcagcagcaatcgcaactgtagtgttaaccgggttagtgataataccaatgcacgctttcgggcaggttttcgcaacttgctgtaccaggtttttcacgatgccggcgttaacgttaaacaggtcggaacgatccatacccggtttacgcgctacgcctgcagagataagaacgacatctgcaccttccagcgccggagtcgcatcttcacctgaaaaacctttgattttcacagcagtagggatatggctcagatcgacagccacaccgggagtcactggagcgatatcatacagagagagttctgaacctgaaggcagttgggtttttaacagtagtgcaagcgcctggccaataccgccagcagcgccgaggactgcgactttcatcctaaactccttattatattgataaactaagatatgttgctccgctgccgcgaccttaatccacaaaattgccgtttacaatgaccacatatcaagaatgtgtagtcacgcaagtttagcgtttatgcatttaattgccgtaatcaggaacctaacttacgtaattaacagtcacttatgcattagcgcaacattccaacaggtggtgacaatataccctaccgctcagccaaaacaatatcaatttgataacaattaatttacttttaagcagaatttgcaggccgtgacgcaggcatgtttctcaataacgaaatttgataaaatcccgctctttcataacattatttcagccttcttcagggctgactgtttgcataaaaattcatctgtatgcacaataatgttgtatcaaccaccatatcgggtgacttatgcgaagctcggctaagcaagaagaactagttaaagcatttaaagcattacttaaagaagagaaatttagctcccagggcgaaatcgtcgccgcgttgcaggagcaaggctttgacaatattaatcagtctaaagtctcgcggatgttgaccaagtttggtgctgtacgtacacgcaatgccaaaatggaaatggtttactgcctgccagctgaactgggtgtaccaaccacctccagtccattgaagaatctggtactggatatcgactacaacgatgcagttgtcgtgattcataccagccctggtgcggcgcagttaattgctcgcctgctggactcactgggcaaagcagaaggtattctgggcaccatcgctggcgatgacaccatctttactacccctgctaacggtttcaccgtcaaagagctgtacgaagcgattttagagctgttcgaccaggagctttaatctctgccccgtcgcttctggcggcggggaaaatgttgcttttgcctatcaaccccctgctttcccctgcgattcatttaacgaatagtgcgttttactgcgacatatcattcacacaatgaatacatatagtaaaaaagcacattatgcaaaattcattatctaattgaaaatactataattaacaataaatgatcgtgtttttaattcttttttgttattaaaattcacatttttaacacttagtatcaactgaaacagttagcgtggtattaattagttcaataattagtgtatacttgattttgtgatatgggtcacgaaacaaaggcccagctaaaagattatgtcgaggtaaaaatcatgaaaatcaaaaccactgttgctgcattaagtgtgctttctgttctctctttcggtgcattcgctgccgactccattgatgctgcacaagcacaaaatcgtgaagcaatcgggaccgtatccgtaagtggtgtggcgtcttcgccaatggatatgcgtgaaatgctgaacaaaaaagcggaagagaaaggcgcaacggcctaccagattactgaagctcgtagtggtgacacctggcacgctacggctgaactgtacaaataaaccctcatcgtcttgtccgacgatattgcccccggttcgggggctttttttgcgctaatgacgaacattaaaacgcaaatgcccttccagttcttcctctgcctcatcaaacagcaatattaacgcgccaaaacggcgacgcgttttctctcccagatgaacaaattcaatctcaagtggtagcggcaggacatcgttcattaacacatcccatagtgagtcgagatcgcgtaccttatctttcgccagaccaaaggtttggctaaagtcacgataaaaatcctcctgactctcaatctcatcaaaatcaaaggtataaatattcatctgttgccaccgtcacgtttcgcggcgagttctgccgttcatcgctaagtatagccatgaaaaaaccgacgcttcaggcgtcggttttgacttaactatcggtcaacgcatgttgatacttatggagcatacccgtaagccgatgtactggttccgtcacctgcggtggcgcttgccagatgcgtagcttttcctggtcaatttccagttcttccagcaactggccaaagtaccgacgacgtttatcatcgctacgggcagatatcacatggtctgctgtgcggcgcatttgtcggtgaaacgccgataaatcctcgttaaccggaatcggcgcatcacgcaggcgctggtgcgcgataatcatcgtcagcgccaggcgaaatttcggcaaatcccctgggaacttattcatcagcaaaaacagctgctgataaagtgccgggaggtgattctctttacgacgtgccacattggtagtcatcgcggaaacagcggcagaaacaaactgattaagcagtacacgtccagtcctgtcgcgcgatttatcccgcaccagcaaaataacggtgaacgcgagcacacagccgacgatttgccctaatgcgctgtcgagaaactgactgaaatggaaagtcatcgggttatccagcacgataatgtttatggtgctggccaacgcccccatcgagcccaatctccgtttctgtacttctataccgaggaagaatcccagcactgccaggctaatacacagcagcaacatgctctgttgggtattagggataatcaccaaaaagtagagcagccctaacggtagcgctgccagcgtcccgtagataaagtcgatcgccaccatgcgtggattcggcaaacgcattgccagtgacgtcactaccgcaatcatcaccattgcaccactgccggaagtccagcccgtccacagccagaaaagcgtgcccagaatgcaagaaagtgtggttcgccagaagttaaccattgcatgatgacgttcggctgactctacttttacttccggttcgccttgcaggatctcttcttcggtggcgttgatttttgtgttactgataacgccgcgcttgagaagctgataacgcgttgccgccgcgacccagctataaatggtgacaggcgtttcccgttccccggtccaggcgataactctccgcaggcgtttgagctgcttgtggacgtcctgcgcagtttctaccggtgtgtcaaaaaattcgcgaaaagtatcagtgatcaattccgggcgcgtattctgaataagataagtttcgcaggattgggtaatcagcgtcagcgatagcgtattgatcgcttttaaacgtcgattggcccgcgcccagcgggaagattccatattcaggttgctgcgcataccttgtaacgccgtagtacgtcgcaccagatcgccccaggctttatcgacaacttcaccatcgccatgcttgatacagagttgcattaattgatattgcgcgaccagcaaactttccagctctcgatccacttcttgtttgatcgatcgcggagaaaagagcaaatccgccataattgcacacacaataccgataacgatctcgctacaacgttcgacggcaaactgcggcgtaagcaatggttccggctgaatggtgatcacaatgatcagcgcggtataaccggccagcccccacgcatacgagttttctattcgtaccagcgaggatatccaggtacaaaaaccggcccagatacagcacaccagaatcatcaataatggtgctcggatcatcgcaatgatgattaccagtccggcaatacagccaataaatgtgccgatgatgcgcaaaaagccacgatagcgaatagcgccagaatacggttcacctcccgcagcaaaggccggaccggcggcaacaatcgccgctgtcagtaccgcccagcgtggcgtttccagctggaagtgaaagccaacaaacagcgccagtacaatggcggtcgccagttttaccgcaaagcgaatatgttgattagcaatggagaaaatacccatcgtgattaaccaaactcacgcaggcgatgagccattttacggaagaacgaatcctgactttcgtcgcgatcttgtttgccagtgactaccaccgtagcagtggtgcccgcaggccagatgttctcttgctggttgtcgagacgaatacgtaccggaacacgttgcgccaaacgtacccattcaaggttagagtcgatggtcgccatccctttgtcgtcacgcgtgctgctggcattggtgacccctgcggcaacactatcaacagtccctttcagcactttgttactgccaagcggcgtgatctccgcacgatacccagggcgcaccccttccagcttagtttcttccatataggccagtacatagaaggagttctgtttcaccagcgcaaccgccgttgatcctcgagtaataaactcaccggtatagacgttgaggttggtcacccagccatctgctggcgcgcggatgactgtacgttcaagatccagttttgccagatcgcgggtcgcctgcgctttcgctaactgatgcagaactgtttgtagtacgttgttggcctggtcgatctcttcgcgagacatcgcctgcacaccgagacggttacgacgtccggcctcctggcgtttctcctgcgccagtacctgataataagcaacatcggcttgcgcttcctcaagcgccttttgataacgcggctggtcgatggtgaacagtacctgtccttttttcaccagctggttatcatgaacattcacctgggtaatgagtccagaaacgtccggcgcgatcgcaacgacgtcagcgctaaagcgcgcgtcacgcgtccacggggattcggtgtaatagacccaggcattaaaaattgcgatgaaggccagaatgactaatacgaccgtgatggccgtacgggagaattttcttattagtgttttcacttcaacctcaaacgaacagtcgcgatatcaaataaaacaagcagcaatagagcgcggtgttgaacaacgccggatgccagacaaagtcgtaaatacctgttggcacaagtacccggcgcaccagccagaaaatcgccagtgataaaagcaattcgaaaaatatcggtgggaaggacagcccaaacaccacgataacgggaaacagactcatgttgaccttggttgtatagagagagcaggcgttattattttcagcatctgtcgccgcagagaagggcatggaaagccgggcgagagcaacattgctgtagattgatatttaatatattaacgtaactgttatgctgttatctatattatgtgatctaaatcacttttaagtcagagtgaataatggaacgactaaaacgcatgtcggtgtttgccaaagtagttgaatttggctcttttaccgccgccgccagacagctacagatgagcgtttcgtccatcagtcagacggtgtcaaaactggaagatgagttacaggtaaagctgttaaaccgtagtacacgcagcattggcctgactgaagccggcagaatttactaccagggctgccgtcggatgctccatgaagtgcaggatgttcatgagcaactgtatgccttcaataacacccccatcgggacgctgcgcattggctgttcttcaactatggcacaaaatgttctcgccgggctgacggcaaaaatgctgaaagaatacccaggtttgagtgtcaatctggttaccggaattcctgcccccgacctgattgccgacggtctggatgtggtgatccgcgtcggcgcgttgcaagattccagcctgttttcccgccgtctgggcgcgatgccaatggtggtgtgcgccgcaaaaagctatctcacacaatacggcataccagaaaaacccgccgatttaagtagtcattcatggcttgaatacagcgtgcgacccgacaatgaatttgaactgatcgcaccggaagggatctcgactcgcctgatcccgcaagggagatttgtgactaatgatccgatgacgctggtgcgctggctgactgcaggcgctgggatcgcctacgtgccgttgatgtgggtgatcaacgagatcaatcgcggggaactggagatcctgctgccacgttaccagtcagacccacgcccggtttatgcgttatataccgaaaaagataagctgccgctgaaggtacaagtcgtgatcaactcgctaacggattattttgttgaggtcggtaaattgtttcaggagatgcacgggcgcgggaaagagaagtaattaatattgtactgttacgttgtacaaacctgtgccaacgggttcccctcaccctaaccccagaggggcgaggggaccgttcgtacacggagaaggattaattatccttctgaaaatactgaaattattacgcagtaccgccaacagtcaggttatcaactttcagcgttggctggcccacgccaaccggcaaactttgcccttctttaccgcagacacccacgccgttatccagtttcaggtcgttgccaaccatcgaaatctgctgcatggtttcgataccggaaccaatcaacgttgcgcctttcaccggcttagttactttaccgttttcaataagatacgcttctgaggtggagaaaacgaatttgccggaggtgatatccacctggccgccaccaaagttcggtgcatagataccgtactcaacggattcaataatttcctgcggggtcgatttacccggcagcatataggtgttggtcatacgcggcatgggcagatgagcgtaggattcacggcgaccgttgccagtcggcgtcatccccatcaaacgcgcgttgagtttatcctgcatgtagcctttcagaatgccgttctcaatcagcacgttgtactggcctggcgtaccttcgtcatcaatcgccaccgaaccacggcgatcgaccatcgtgccatcatcaaccacggtacacagttctgaagccaccaactccccgacctgtccactaaatactgaagtgccacggcggttgaagtcgccttccagaccgtgacccaccgcttcatgcaacagcacgcccggccaacctgcgccaagtactaccggcatggtgcccgctggtgcagcaacggcagaaagattgaccagcgccatacgcactgcttcttttgcccacgcatccgcacggacttcgccgtcgagatcagcaaggaagaactcataaccaaaacgaccgccgccaccactggcaccgcgttcgcgtttgccatcttcttcgaccaaaacgctcacggaaagacgcaccagcggacgaacatccgccgctagtgtgccgtcggtggccgcaaccagaattaattcatagacaccactgaggctggcagtcacttcctgtacgcgcttgtccgcttcgcgggcaaccttatcgacgcgacgcagaatatccaacttctcttcacggctcatgctttgcagcggatctaccgaggtatataacgggctatgctctaccgcgcccagcgtctgtactttgccatcaccactatcacggacgatggtgcgcgccgcttgtgcactctgttccagcgccagcaggctgatttggtcagcataagcaaatccggttttttcaccactgattgcacgcacgccaacgccctgatcgatgttgtaagaaccatctttaataatacggtcttctaaaacccaggattcgtgatagctcgactgaaaatagagatcgccataatcaaggcgacgttcggccagttgaccgaggatcgcgaacaagtcctgatgtttcaggccgttcgccgctagcaattgttcacttaccaggttcagactcatcgtttttgctactcgttagttactgcagtagaggattttttacggctgccggatgcggcgtgaacgccctgtccggcctacggttatgttctggctcgttggcctttggcaacgattatcatatgagattggggcaattacgcgccctcgtcaaatcattgcgctttttctttgcgcggttgtcgcaacacttcgttgatttgcggatcgtccagcggacccgaaatgtgatagcgcaaaatggagactttgctccacagcggtcccagcactttactggcggcaaacactgccgcgccaacaatggggttaaccgcaaaggccgcagccacgcccaccgtcgcagaaatctctggtgcgacaaccgcttccatattcaggtcgcgacgtaccagatttaccgaccctttcatagcgatgtccgcttccaggccatccaccagcgtgtcgtcggtgtgcataacgccgtctttaatccacgcggtgctgcgaatggagtcaaaatagaacccttcgccaaaagtgtctctgaaatcaaaacgcagcttacgcatcagggcatctacgctcaataagcgcagcaattgcccggcatgtccggtattgatttcggtaatttcgcctttacccagttgagtatgaatgatgccattcaacgtcacctcatctggctgccagggtgctttgcgccagtgtaaatcgtaatccacattaaatgacgactggcgtatgggcgtcgtgacaccaaaaaattctgcggcggcatcaattttctgcccgcgcagttttcctttcagcgaggttcgttcattccccggattgttaacccattcaccatcggcagtgagccgcgcaaaaccagtatcaatcagtccattagtcagcgttaacgtatcgccagaaatggtgatatcactgtcaatgcgaccgaatttttgcccccagaaccagcactctgcgcatcgtatttgtgcgtctggccagccacggaagttaatgcgttccgttgtcgggaaaggtgatgactgtgttgaatcaccacgagttttcgccacgcttgggttgtaataaagatatttgatattcgccagccacggtgcgttattacgcatcgccagcgtggcgttgatttcacgcccttgcgcctcaaccagggtgccatttgccgtcggttgcgaaacaatactcaggttattccattgctgatttcccagcgacaacataggcgtacgtaacgttatgtgttgtgggaaactcgctgcaccaccgacactctccgccgcgcctttctggaacagggccagccactcggcaccattcatcggcggcatattgagttcaacgccactttgttccggcaacggcgggagcgttttactgtctgccgcccaaatagcacgatcgagcgtcagcttttgaccgagcaaccagcagctattgaaatggttatccgcaccagcctgtccggttaattcaaagctgttgagattgccatcaaccttaacgtttaccggtagtggttcacccgcaggtttggctaacggtgaaggtaagtgactgctcacattcttcagatcgccgttcagctctacgttatacgtcgcgccagcatgataaggcagctcaatgcccactttaccatcccacgccacgctgccacttaatgcttcgttcaccgctgcaggcagaaagccggttttcgctggttgccagttaccgttgagattcaccgcgacctggtaggcttttgccccttctttggtggaaaaatccacgttcaacggctgattaaaccagcttgctgtcagtggttcactttgcagatcgccattgataaagctgaatttaccgctcaaatttttcagggtgctgtcgagtggtttgataaacagactgttattacgcagcgtcacttcacctttcgcggttaccaactcgccgttcagcgggatatcaagatgtaagcgagcattcacatcgccgtcgagctggagttcttgcagggtcgcacccagggaatctttcagcggtgtctcatcaaagtaagggccaacggctttacccggacctttaatgtcagcgtcaatcagcagtttttcttttgagtagtcagggagcactgcggtgagattactcgcgcgcacgccgcccagattaacgccatcggttttcatccataaaccgtcgttaataaagtccagttcaatatcaaggttagttaatgcaggccagtccggctggaaggcaaacttcgcgttgcgcagcggcaccagcacttcaaactgaccttcgttgtgtttataggggaagagttgcggattgccaccataaaccagcgtcgcgttatccgcttcaccgccctgaatcgcgccacttaagtaatcaaccaggtctttacccatcaagttttccgggaaatagcgccaggcttgtgaaccatcatcggtactgatgccagccagaatacccagccagggttcatcgttagcaggttgcaggtaacgaaaaccgccgcgcgcatggacggctttggctttaacgtcaatattacgcccatccagctggaaacctttgtcattgttcagccagcttatcgttgcctggccgtcggcgatttccagtggcgcacggaataccgtttcgtaaggcatctttgcctgcttcatcgacgcagtaagcaaaccattttctacgctgccggaaagcgtcccggagaagtgttccgcacccggtaataatttccattgcttccaggccagatcgctccacgatgcctgaaaacgggtcttgtctgccgcctgaagcgggatatccagcgccagagtgttaatcttgccgctcggttgtgtggagcgccaaacatcacccagtgcaggtgaaagtttcgcgaccagcgggcgtacgccctccaggcctgccagctccagattactggcacgaatccggagttcgtcactgcgtttattgtctttgccgccaacgtcctgttccggtatccaggccagcgtcaatgctccgctcggccagggtttgccgtccatcgtgatccgtgtatcgggaatagagaactgccatcccggattttcacgcgtaatatgcgcagtcagattatccaccgacagcgtatgtgtttccttctcgcccaaccagctggcaccgccctgtttcagccagacgtcaccgccggttacatcgcctttgtcgatcgtcatccagccttcaagggagaactgtgccgtttccagcgcaatattgtcctgcatccatttaccgagccacggcttcaggtcgatgtcatccgcctggagccagacgcgaccattgcttaacaacccctcatcatcgcgcaaatccatacgcacctgcatcacgccgtgctgtccggtaaggctggagaggcttaccaggccttccgcacggtgtcgacgtggatcgttcagccaggtgagctgtgggatcgccagctcggcgcgctgaccggatggcgtcaggaaactgacttcactgtcgcggagatcgaaatggtcaaattgacgaagaaacagatcgctgatgtgactggcttccaggctatcattaccaccgccgctggtgataggagtgttggtgcgaaaacgcagctgccagaaagtgaggtcgcgaaactgccagcgcatatgtaacaggctctgccagacatccagcgccagagtaacgcgtttaaccgaaaattcgccgccatcttttagttctgcacggatgtcgtgcgcttcaagcgtcggaccaaaattctgccagctggctgagagctgactggcttctaccggcatgccagtcgcggattctattttgttgaggatttccggacgccaggcgtcaagatgcggtaaagcaatacgcaggccgctaaccagcagggcagcgatcacaacgagcgcggctccagtaagcagtaaaatccccggcaatcgcctcacccgtcactccttgtctgctaaaaatgtgactcaaaaaccctttgccggatggcggcccagcatctgtttacatcattacgacgtcaaactgctcctggttatagagcggttcaatttgtactttaacctgtttgccaacgaaaatttccacttccgccagcgagtgtgactcttcgcctttcaaggcttcggctactgccggagaagcatagaccaggaaacggtcggagtcgtaagcatggtggacacgaacaatctcgcgcatgatttcatagcataccgtttccacggttttcaccgttccgcgaccgtggcaggttgggcattcgttacacagtacgtgctcaatgctttcgcgggtgcgtttacgcgtcatctccaccagccccagcgccgaaaaaccattaacgctggttttcacccgatctttgctcagcgcctgctccagcgagtgcagcacgcggcgacggtgatcttcattattcatatcgatgaaatcaataatgataatcccgcccagattgcgcaaccgtaactggcgagcgatagcctgcgtcgcttcaatattggtattgaaaatggtgtcgtccagattgcgatgaccgacaaacgctccggtattgatgtccacggtggtcatcgcttcggtctggtcgataatcagataaccaccggatttcagttctactttgcgttccagcgctcgctgaatttcgttttcgacatcaaagagatcgaaaatcggctggcgtccggtgtaatgctccagcttgctggtcatctcgggaatgtactccgaggtaaactccagcaatgcttcgtaagtcaggcgtgagtcaacgcgaatgcggtcgagttcggcgtcggcgaaatcacgcagaacacgctgcgccagcgccagttctccgtacagctgataacgggtctgcgggcgttttttacgctccatcactttggtccagacgcgtttcagataagcggcatcggaggccagttcagcctcgccaaccccttccgctgcagtacggatgataaacccgccctgctcgtcgcaatactctgcgaccacttttttcaggcgttcacgttctgattcgctttcaattcgttgggataccccaacgtgagaagcccctggcataaacaccagatagcgagaaggtagcgtgatatcggtggtcaggcgcgcacctttagtgccaagcggatctttcaccacctgcaccatcagatcttgcccctgacggaccagttccgagatgtcgcgcaccgtgaattgcttttgttcttcacccgccacacattcagtgtgcggcatgatgtcagatgcatgaagaaacgcggctttatccagcccaatatctacaaaagccgcctgcatacccggaagtacacgacttacacgacccttgtagatattgcctactattccgcgtcgcgcctcacgttcaatatgaatttcctgcagaataccgccatcaatatacgccactcgcgtttccgaaggcgttacgtttaccaacaattcagccgtcatgtttatcccttttctcacgcagtgcgttaaaattacttaataattcatacgtttcaaccagcggtaagccgactacggcgtgaaagctgccatttatcttcctgacaaaacagccacccagcccctgaataccgtatgcacctgctttatctaacggttcgccgctggcgacatagcccgcgatgtcttcgtctgttaacgttctgaaagtcacatcggtgaccaccaggcaatcgagaatgtgctggctgtcagccaacgccactgccgtcatcacctgatgggtctgacccgataatttgcgcaacatctgcgccgcatgctctgcgtcgcgcggtttctcgagcacttctccgttcaggataacgatagtatccgcacccagcaccgggagatcctgcgccgtttgcgcgacacccgcctgtgctttctcgcgcgccagacgcacaacatactgctgcgcgctctcctgcggctgacgctgctcctcaatgcccgtaacaatacgttcaaaggtcacgccaagttgcgcaagtaactcctgacgacgcggagaaccggaagctaaatacagagaagtcatagaaacctttattgcactgcaaactgctgacggactttacgcatcagcaagaaaatccacggccagagcaccccattgactacactactccagaacacttccggtctgaaagagacgttaatcactaaaaactctgcccagaaaacaataatatccaccaccagcgaaagcaacatgacgaccagcgcctgctgccataatgcgaggttgcggaaaagctggtatttcagcgccaccaggtaagcaatgatgctcatcgccaatacgcgtacgccaagcgtcgagccgctgatcagatccagtatggcacccatcacaaaacctgtgcccacatttacgcgatggggcaaggccaggatccaatacaacaagatgagtaacacccagtttggccggaaaacaatcaggttatccggccagggcatgatttgcagcaacagcgcaatgaggaaagagagccagattacccagcgtccctggctacgatagctcgccactattgtcctcccggcgcacgcgcaggcggttgagcaccactttgcggcggcgtagccctttgtggagagcgattagcagcgggctgtgtgggcgcagcaggcgcagtaactgcatttcctgtcgccggttgctgcggagtcggctgagtgatccccgttgccggttcaggtaactttggccccatcgcgtctggcgaaggcaatacctgcggcatcatctgcatcagacgttcattggcaacacgatgcacctcttccggcgtcatcgggttagcgccgttacgatccgcgccccacagcagcagcagataacgcaaacgttgcagtcctgcagtcggacgcgcctgaatcacagtataagcgcgctgggtatcgagttttacggaagagacaaccgcgaccggatagccttccgggaaacgaccgcccagaccggaagtcaccagcacatcaccaacacgaatatccgtattcgctggcagatgctcaagctgcaaatcatccgtacaaccgttaccggctgcaattacgcggatatcgttgcgcagcacctggattggcagcgcgtgggtcgcatcacaaatcagcagcacgcggctagtcagtttagcgacggccaccacctgaccaacaacacctttgtcgctgatgaccggctggccttcataaacgccattaacgctacctttatcgataacaacttgatcgctataaggatcgttaaccgtggagataacctgagtcaccattttctgctcatcctgacgcagcggggaacccagcagctcgcgcagacgcgcgttctcctgtttgtattgtccaagcatcagcagttcactgtttttcagcaacagttcctgacgtaacgcccggttttcaagttctagttggtcacgcgaggccagcgtctgcgatacgccatccagcaattcacgaggagcattggaaacaaagtagaaaggactgacggcggtatccatataagtacggatttgactgaacgtccccaggcgactgtcggcaataataatgccgagcgccaccagcaccgccagaataaggcgaatctgtagcgacgggccacggctaaaaattggcttcataagttatgcgtattctcgtatcagaccaggcagggtaaacagacacttcccctgcctgcatccgattactcttcgctgaacaggtcgccgccgtgcatgtcgatcatttccagcgctttgccgccaccgcgcgccacacaggtcagcgggtcttcagcaacaacgactggaatgccggtttcttccattaacaaacggtcaaggttacgcagcagtgcgccaccaccggtgagcaccatgccgcgctcggagatatcggaagccagttccggcgggcactgttccagtgcaaccattaccgcgctcacaataccggtcagcggttcctgcagtgcttcgaggatttcgttggagttcagggtaaaaccgcgtggaacaccttctgcaaggttacggccacgaacttcgatttcacggacttcatcgcccgggtaagccgaaccgatttcgtgcttgatacgttctgcggtggcttcaccgatcagagaaccgtaattacgacgtacatagttgatgatagcttcgtcgaaacggtcaccaccaatgcgcacggaagaggagtaaaccacgccgttcaaggagataacagcaacttcagtggtaccaccaccgatatcaaccaccatagaaccggtcgcttcagaaaccggcaggccagcaccaattgcggcagccatcggttcttcaatcaggaagacttcacgggcaccagcgccctgcgcggattcacgaattgcgcggcgttcaacctgggtcgcgccaaccggcacacaaaccagaacgcgcgggcttggacgcataaagctgttgctgtgcacttgtttgatgaagtgctggagcattttttcagtcacgaagaagtcggcgataacgccgtctttcattgggcgaatggcagcaatattgcccggcgtacggcccagcatctgcttcgcgtcatgacctactgcagctacgcttttcggtgaaccggcacgatcctgacgaatggccaccacggaaggctcattcaatacgatgccttgtccttttacataaatgagggtattcgcagtacccaggtcaatggacaagtcattggaaaacatgccacgaaattttttcaacatactaagggataatcctgaaagctggggcggaaaagaaaatccgcttactttaccaaccacacgcagcagcgacaaggcgcaaaaatcatctgctacggtgaaaattagtgcagttcgtttcctttgttacaaatctctgcctgagtccagaaaggcttaatgcatcagcagcattcctcgcctgtttgcaaccgcgtaaggtcattcatctgcatatgtgctgcaacaatctggcgagcagacaagcacactcccatgagacgcagcgcgcgttattctacgtgaaaacggattaaacggcaggttaaaccgagtatctttgtgaatattttttcacgttagtatcaagtggctgtgaggacgcgaaaaaatccccttgcccacctgtaacaccacgctgaatcagggtctgccactcgcttcgcgaacgcacgccggtggcgtaaacctgggtgctggtcccggagcaggcttccaccaggctttgaaccagcagttggttctccgttcgcttctcaatgtttctgaccagccccggatggagcttgagtaactcaacattaagttctttgatccaactggtgcttaccagcgtcaaaccagcctggttgacggctacccgtacccctaaagcattcactaaacgaataacaggttgtaagcgactgatatgttgaccaacatcggcctctgcaagttcaataattatgcgtcttcgttgcgatttttcacattgcattaacgtatcgcgcagccaacgctgaaaacgcgggcgaatcagcgactcaacggtaacctgaatcgccagattttcctctggccagtaacgcaatagtggaataagacggctgattagcaggcggtcatactcttccgataaaccaaactgcaagaccatcggcatatactctgccgagctaacctcttcattaccatcgaagatgcggcacatgagttcacgatgatgaacccggccttcgcgagtaaccgccggtttttgataaaggcgcgggccgccgcgactgagcatttgctcgataagcgtacgccagcgaacattaccgcgtcctttttcaggcaacgagtcatcgtaaatagcccagctattgccgccctgcaatcccgcattacgcgtggcagactctgcatgttccattacctgctcggtatcctgaccactacgccaggcacagataccaatgtggatcatatcgtcgcgatcgagcattttattgttcggcaaggtatcgacggctttgattaactgactggcgatgctctctgcctcttttaacgtccggtgcggtaacagcgcagcaaaatcactgcggtggtaacgcgccagcagtgcgccagggtagcgcatcataaatgtcgatagcagattcgtcagagagaagaactgttcttcaacctggctgtgcccccaggtatcactcaacatattgaaatccggcagacgaatcatcatcacgatcccgtgggtaccaactttctcttgatcttccagtaacgttgctaactgattatcgaaaaagagtcggttattgaggccggttttcatgtcctgggcggcataagagcggatcagcgtatcaagacggctgtgttgttcgcgtgcgttctgaatttcacaaagcagcgtatccagcgcactgctggttctgggcggccattcatagatggttcccaacacattagagccacgctcaccgtttaagatacgagtagcccgggtttccagcaattcttgcccggcaagttgccgttgtaaccagcgtaccgccaggaagagcataagaatgataaagccaatcgcccccgtgagcggcgcggtagtcattaaagaatggaaatagttgcccatcggatcctgataaaccagacgcagcgacatccccggatgctttatcaacggaacgctcagttcacgaaacagatcgttggtgccaaccggacgataactaccatttctggccagggtataaacctgcttatcaccatggagcaggtctacacgaacgatatctgccgacatcattaattcggtaatttgtggccttaatgtgctgaagtcattcgacacaaggtaggtatcaatcgccgtcgccaccgcctgaacacgatgactaaacttatactgaatggcgttgtagaaacttagcgaacagcccagcaaagtcacaaaaattgttaacccggtgagcagcgtgacaaaggccgaaaatttcgtcgttaatctcatccttgtgttaactccgatagtgaggaagcgggcatactagcaaatcagatttatctcgcaatttattgcgcttcatcggctttgcttttccattagcgagtatagtcttcagaaattattttccaatccatcatgcacatgaggaccacttatgcaggcgttacttttagaacagcaggacggcaaaactctcgcatcagtacagactctggacgaaagtcgcctgccggaaggcgatgtcacggttgatgttcactggtcgagcctgaactacaaagatgcgctggcgattaccggtaagggaaaaatcatccgaaattttccgatgattcctgggattgattttgccggaactgtacgcaccagcgaagatccgcgttttcatgccggtcaggaggtgttactcactggctggggcgttggtgaaaaccactggggtgggctggcggaacaggcgcgagtgaaaggtgactggctggttgccatgccgcaagggctggacgcgcgtaaagcaatgattatcggtactgccggttttaccgccatgctgtgtgtgatggcgctggaagatgccggtgttcgcccgcaggatggggaggttgtcgtgacgggtgccagtggtggcgtcggcagtaccgccgtggcgctgctgcataagttgggttatcaggtcgttgctgtttccggtcgcgaaagtacccatgaatatctgaaaagtttaggtgccagccgtattcttcctcgcgatgagtttgccgaatcccgtcctctggaaaaacaagtctgggctggggcaattgacaccgttggcgacaaagtgctggcaaaagtgctggcgcaaatgaattacggcggctgcgtggcggcctgtggtctggcgggtggttttactctgccaaccacggtcatgccatttattctgcgtaatgtccgtttgcaaggggtggattcagtaatgacgccaccagcacgccgcgcacaagcctggcagcgactggtcgccgatttaccggaatcattctatacccaggcggcaaaagagatatctctggcagaggcaccgaagtttgccgaggccatcattaataaccagatccagggtcgcacgctggtgaaggttaactaaccatttagcagggaataataagagagggaactcattttgaaatcattattcaatcggttaacgggaaaagcggttagccggacagctttcgtcgaacatcttggtcatgaagttgtacaacatcatccaaactggaaagtcatgatttcgactgaccataaattgatgcgcattgatactccaccaaacagccattattgatacgcctccgtcgcctgttaggtttatggtgctttgccttggcgacgctacgcttaatctgttactgatttctggtaccatggggggaataatctgattttatttgattacaaattaaccacttaaacctattgaatgcggaacattgtcagtcggttaattttgcgtgctttagcattcacatctttccggacgatgcagtgaaaattgggtaatccccagcaaccgctgcgtaatgtcgtctatcttgtcgcgatcctggcatccctacattatttgtggtctgtgaagattatctcattgcagccccccatcttcgcagggctggctttacagcttttcaccttacgttataagaagttccgtcgatgatggcgctaatttcgtgaattgtgcggcttgttgcaaattacacggtgttgaaggttatttacatgttagctgttgattatcttccctgataagaccagtatttagctgccaattgctacgaaatcgttataatgtgcgacctcgtcctccctgacgcagtttttgcgctgcggaaaaggtgacattggcgcaacgaaggtatattttgttttttgccggaggatagcagcagatcgctgcacaatgtccgtcaagtctaacattgacactctggggcaaaatagaccggcgtcccggcctgctggaatttatcgctatgcatacagctgtcggggcatacgctttacagacggcggtgaaacgcctgtcacaatcacactaaacaaagagtacggaacccactcatggatattcgtaagattaaaaaactgatcgagctggttgaagaatcaggcatctccgaactggaaatttctgaaggtgaagagtcagtacgcattagccgtgcagctcctgccgcaagtttccctgtgatgcaacaagcttacgctgcacctatgatgcagcagccagctcaatctaacgcagccgctccggcgaccgttccttccatggaagcgccagcagcagcggaaatcagtggtcacatcgtacgttccccgatggttggtactttctaccgcaccccaagcccggacgcaaaagcgttcatcgaagtgggtcagaaagtcaacgtgggcgataccctgtgcatcgttgaagccatgaaaatgatgaaccagatcgaagcggacaaatccggtaccgtgaaagcaattctggtcgaaagtggacaaccggtagaatttgacgagccgctggtcgtcatcgagtaacgaggcgaacatgctggataaaattgttattgccaaccgcggcgagattgcattgcgtattcttcgtgcctgtaaagaactgggcatcaagactgtcgctgtgcactccagtgcggatcgcgatctaaaacacgtattactggcagatgaaacggtctgtatcggccctgctccgtcagtaaaaagttatctgaacatcccggcaatcatcagcgccgctgaaatcaccggcgcagtagcaatccatccgggttacggcttcctctccgagaacgccaattttgccgagcaggttgaacgctccggctttatcttcatcggcccgaaagcagaaaccattcgcctgatgggcgacaaagtatccgcaatcgcggcgatgaaaaaagcaggcgttccttgcgtaccgggttctgacggcccgctgggcgacgatatggataaaaaccgcgccattgctaaacgcattggttatccggtaattatcaaagcctccggcggcggcggcggtcgcggtatgcgcgtagtgcgcggcgacgctgaactggcacaatccatctccatgacccgtgcggaagcgaaagctgctttcagcaacgatatggtttacatggagaaatacctggaaaatcctcgccacgtcgagattcaggtactggctgacggtcagggcaacgctatctatctggcggaacgtgactgctccatgcagcgccgccaccagaaagtggtcgaagaagcaccagctccgggcattaccccggaactgcgtcgctacatcggcgaacgttgcgctaaagcgtgtgttgatatcggctatcgcggtgcaggtactttcgagttcctgttcgaaaacggcgagttctatttcatcgaaatgaacacccgtattcaggtagaacacccggttactgaaatgatcaccggcgttgacctgatcaaagaacagctgcgtatcgctgccggtcaaccgctgtcgatcaagcaagaagaagttcacgttcgcggccatgcggtggaatgccgtatcaacgccgaagatccgaacaccttcctgccaagtccgggcaaaatcacccgtttccacgcacctggtggttttggcgtacgttgggagtctcatatctacgcgggctacaccgtaccgccatactatgactcaatgatcggtaagctgatttgctacggtgaaaaccgtgacgtggcgattgctcgcatgaagaatgcgctgcaggagctgatcatcgacggtatcaaaaccaacgttgatctgcagatccgcatcatgaatgacgaaaacttccagcatggtggcactaacatccactatctggagaaaaaactcggtcttcaggaaaaataatttgtgacgcgcggtgtttccatcgcgcttagcaaagaacgtaatcaacgccgggcctgttaatgctacccggcgtttttattgccgttaactaacggtagcctgcaatttccgctttcaacgcgctaatttcagcatcgccatcaacaattcccagctcaaagcagtatttctttgtttcccctggttcaataaagggcagacgcccctgcgctcgttctttatcacgaccgtcaagaaaactattactgacctccagtcccataacatattcacccgcgcctaaatttttccactggataaagttgggtagctgcatgatgtcgaatttctcgtaaattccccaccccagttcggcgttcaccagcgcaactttactcatcccctgactgtcgctattcaacgtgagatagtaaacctgctcgtcaaaaccgggctgtggggtacaaatctccagatgactggctaacccttccgccgcatgcggggttcgtggcgttacgcttttagccgacagcaaaatttctgcctgtggcgataataaaggccagccgtaattaaagtgataaagaatttgcagcggctggcgggtgaaaccatgattagtcaccttgtcttcaatgcgcagcacattttcgccataacggcagcgaatggtcctttccagcgtcagattttcaccgaacaatcgtgtttcccgtactttgccattgatgacaaattcaatgctgtcgtcggtccgttctgtgcgataccccacctcttctgctggagtcgcagccaaacgcccgtgtaaccccagcgtttctccttcatcctcacagggcgtgccaatgtagctaagtccgcaggtagtcagtaaccccgcgtaaaagctacgtaaaaacccgttgccctgagactcaaaaaaagcgggggcgacaacaccgttgggggtgataaaagagagcgcagtgtccttgtagctggcccatgcaatatccagcgcgcgatcttttaccaccgtaaatgccagtcccgcaccagtacggacatcaaacgcttctgtaccctttgctctgccactacgtaactcatagtgtttaattccggcaacctgcgagagatcgccaatccacgaccaaatttcgcttttcattgtgctgcttcccgaatggacatgtcatggcgctggatgaacgtttcgatttccataaggcgagacgttccctccattgggccacgtcgggttaccgccagtgcaccgcaggcattggcatattgtaatgcccgatgggcgtcaaaccctagctggcggcaggcaatccatgcgccaccaaaacagtctcccgcaccggtcgggtcaacttcttccaccggatagctctcaacatgaaactgctcattcgcggagtagtaactggctccttgattgccgcgcttcacaatcacctctttaacaccttcttcaagaaaaccagcgattgcacgctccggtgtcgagtgtggcgacaagagcaacacttcgccctcgctgggcatgtagatatctgttaactcaagaacaaagtggagggcatcacgcatttctggaatatcgagcatctctttacgaatattcgggtcgaaagaaataacgccaccatttgctttaacgatggttactgcttttttaactgcgtctaccatatggaatgaaaacagggatgaacccataatatgaaaatgggtacaatccttcagaatattttcatcaacatgctgtgccgataatttaccgcaagcagcattcttgatattaaaaataaaatcgcgatcgccagagttatgataagtaacaaaggcactaccggtggcttccagaggtaagactgaaatccccctgatgtccacaccgtcagcagccagacgatgtatattaatatcaccaaagccatcattccccacgcagctaatgatgccgcacggaacgccaagacgtgtcacctggtcgataaaaatagcgggcgcaccactgggataagggccgttccagatacctggttgatcaaatggctggccgattttactcgccataatttcaaccagaatttctccaattgtgaagaccttactcatatgattaattccttgaaatgattagctgcgttttcttttatttcttacgtcaaaataaacggctacaagaatgactaatcctttaaccaccatctggtaaaaataaggaacattcattaagttcatgccattattaataacgccgatggttaatgcgccgatcaccgtccccaccacggttccatagccgccattcaggctggtgcctcccagtacagccgcggcaatagcatccagttcgtagctcaacgcggaattcggttgcccggaatagaggcgtgaggcaaggatcatcccgctgatacctgccagcacggctgtaatcataaagactttaattttcaagcgggtgacatttatccctgaataaattgccgcttctttattaccaccagtgatataaatttttcgtccaaaggttgttttagtaagaatgaagtggtttatcagcaataagatgattaatatccatataggaataggtatatagagaaattctccattccccagcgccagaaaagcatcatctttaatcatgatgggcataccatcggtcactatataagcgataccacggaagatccccatagtagcaacggtgacaataaacgaagggatccccgctatagccgtcaagccaccatttatcatccccaaagccagtgctgcaataatggataatgggaccaataaaacaaatggaattccccatgaagccccaagcgcagcaaatgtgccaatcaatgcaatggttgaaccgaccgataaatcaatatcgccaagcaaaagcacataagtcattccataggcggtaattgcaattatcgaaacctgaagaataatattagtaatgttattggcggtaaaaaaactgtcattaataaaactgaacagaatgattaacaccaccattccactgaggataccaccatattgcctgaagacttttttaaaattatttgcaatgggaatttccgaaggtttcggactggcaagagttttctctgtcatttaacgtactcctgttgcagcggtcattacctgtgtctgcgttaaattttcacatgaataaatatcggcaatcgttttattacgcattaccaccagacgatcgctaagtgccatgacttctggcagttcagaggacaccagaataattgctgtccctgccgcagccagttgacgtatcacgttatagatttcaaattttgcgccgacatccactccgcgcgttggttcatcgagcaataaaatacgcggagttttctccagccacttcgataacacgattttctgttgattaccgccgctcagtgctcccactgcctgatgcacagaactcactttagtgttcattctggcaattgattgcagcgtcttcgcctcttcttgtcggtgattgatgagtcccatccgcgaagcgttatattgaaacgccacatggtgcgtgttcatattgatgtcgtgcatcagcactaacccttcttccttgcggttttcggtcacaaaagcaatgccatgatcaatagcctgtttgggattagcgatcctgacttccttaccatcaatcaacacagtcccgtgatacgaaacgaggccaaatagcgccttcatcacatcggaacgcccggcccccaccaggccaaaaaatccgaggacttcccccggacgcacagcgaaactgacctctttaaaaagcgaaggatgggaaagattttttacttccagttttgcaggaacattttcatccggtttttccccaagacgtgctggccaaatatttttcatttcccgaccaaccatttgggcaatcaagtgctggatatcactgtttttcttttcatgcgtagcgatatactcaccgtcgcggatcaccgaaatatcatctgaaatccgcataatttcatccatgcgatgagagatataaataaccgcacagcctcgctgctttaatttttcaataatgttaaacaggatctccgcttcattatcacttagcgaagatgtcggttcatccataatcacgacatccgctgcatagcttaaggctttagcaatttctaccagttgcctatgtgccatcgacatattgccgaccatttccagagggtctagtgggatgcccagttccgcgaggaggttctggcaatctgcgagcatttctttatcgttaattataccaaaacgtcgcggttcattattggcataaatattttccgccacggtcatattattactcaggctcagttcctgaaaaataatcgcaatccctaactggcgagaatgctgcggattattaatggtgatggtttcaccacgtagtgttatcgttccctgggttggcggataaacaccggccagtattttcattaatgtcgatttaccggcaccattctcgcctaataaagtatgcacccgccctttacgtaaagagagtgtaatatcttttaatgcctgaacatgaccaaatgtcttcgcaatatgcgaaacatcaagaataacatccgtcataatgacctcggtgtcacaacaaaacgccaataacgttttgttgtgaggtgaagatatttactatttacctgtataaacgccgggttgtaccgggatcattttttctaccggtttaccattgaggtgatcaacagcggcatcaatggctttagcacccatttgatcgggatattgccgaatcacggccgcaaacgttttttcactgtcaacggcatcacgcgcttctttcatgccgtcaaaaccaatgattttgatgttgtcgttatgcgcagattttgctgcgataaccgctgccagcgccgcatcatcaccaaagccaaacagaccattcaggttagcatttgcctgcataatgttttgcgcagtcgttaacgcttcagcccgcgtaataccaggctgttcagcaacaattttaatatccggtgtatcgcttaaccctttcttaaaaccatcaacgcgcgcaaccaccgattgtagtgccggataagaaataatggctacagtacctttaccatgcaaaagtttacccattaacttgcctgcttcaacgcctcccgcatagttatcggtcgcaacatgcgatacgaccggaacgccttccgcagcgacgtcaacggtgataacgggaataccggccttatcggctttaattatcgctgcctggacgcctttcgaatcgaccggagagataataatggcatccacttttttagtaataaaatcctcaacatcagaaagttgtttgtttaaatcctgattggcaatagagacacttaaattgacattgtctttttttgcctcttctttcatggcattcgcaagatcaatatagaaaggatgttgttgtgttaataatgacgcaccaattttatactcttttgccaacgaactttgcgagaacaatgccaggctcaccaacatagctgaaccaagtaatttaatatttttcataaacaatcctcattatttttgtagggtacaacgtcttaaatttttccttcactaccacagacgccaataatacgagttacgacttctttcatggcggcctttgcgggctgcatatagtgacgtggatcatttgccgcaggattgttgtagaaatatccttttaacgcatcggcaaacgcaattttcaattctgtcgcgacattcactttacaaataccgcgacgaatacagtgctgaacgtcctgttccgataagcccgaagcaccatgcaacaccagcggaatctccactcgctgacgaatctgttccagccgcacaaaatccagtcgtggttcatgcgcatataaaccatgtgctgtgccgattgctaccgccagggagtcaatttgggtacgttgaacaaactctgcagctgcggctggtgaggtataagcggaatctttttcatccacccgcagatcgtcctcctggccgccaagacgccctagctcggcctcaacgctaacatcaaagcgatggcaaaaggtggtaacttcttgcactcgcgcaatgttgtcttcaaatggcaaatgggagccatcaatcatgacagaacggatccctgcgcgaaccttgttaaaaatgtcatcactctcttcatgatggtcgagatgcaggactaacggcaggttgtactcgcgagccagcgattgtactaacgaaattaaacttcccacgccaccataacgatatgtaccgggtgttcccgccagcataacgggagagcgaagttgtgcagcgctctcaacaactacctgtaaagtttcaaggttatgaatgttgaaagcagggacggcatatccctctgactgggcttttttcagcatgtttttgcttgaaataatatacatcgcagctcctgttattggtcgttcgccttacaaaatgaagaaagagaatctttactttcattttgaaagcaaactagcacagcaaaagcagcaaaaagcgtgatgcatgtcgaacatcatcaaaataacttacaaaaaataacttaatttatttttcactttgcaagtgaaaccaatgaaaaccctgcataaatatgaatatattcatttatttttcaatgtattaagctattttcgttgcaatttttgacccatgattttcttttcgaattgtcgatatgattgaaggataactttcaaagaaaaatacaaggggctatagtgttacgcattaaaggccaatgaagagtgttaacgtgccgagaaaatcgtctaacctactgaaacgcagattaaaaattgcagaaattgttgccgcccagggtgaaatcaaagttgatgacttatctgcgcaacttggtgtctctggcgtgacgatccgcggcgatctcagttatctggagcaacagggatatttaaagcgatcatttggcggtgctattgcgacaccactctcctctgaaccagaagcgatacaaccgatcgcgccattgtctctggcacaacaaatggaaatagcacgacattgcgcacgattaattcgcgatcgtgacacgctatttcttggacatgggataatctgccgtaagatcattccattgctcagcgaagtgaaaaaactgcgtctgatcaccaacgatcccgaacatgcgctgctggcaaatcagtttattgatggcgaaataatactggctggcagtgaaatgttgcgccccgacaccgcactggccggaaaacagcttgaacaggcacttcagcatttcaccattacacatagcatcctggaaatcagccatctggatgctgatggtactttaaatatcaacgttcccagactcgccgctgcctggcagctctgtttcgatcatgcccagaataagacggttatcgttgccgccgatcctgcgccatcaacggctgctatcgggcatttgcatcaggcagaaaatgtgatcgtcagccgcagcattaacgaacaatatcagcaacaattgcagtcggctgatttcgttatcctttataccagtaatgagtgctttacctggtccaatcgcgaaaggcttcaggaatgagaggggttttgtgacaacaactatctgcgctatgggcgaattgctggccgagtttttgtcccgcaacccacatcaaaaattcactcagcctggggagtttatcgggccatttcccagcggtgcgccagcaatttttgctgctcaggtggcaaaactgtcccatcgggccatcttctttggatgtgttggtaatgatgattttgcccgactcattatagagcgtctccgtcatgaaggtgtcattaccgatgggatccatgttatgaacaatgccgtcacaggtacggcgttcgtgagttatcaaaatccccagcagcgggatttcgtctttaatatccctaacagcgcctgcggtttgtttactgccgagcacattgataaggatctgcttaaacagtgtaaccatctgcatattgtgggctcatcgttgttctcatttcgcatgatcgatgtcatgcgtaaagcaataacgacgatcaaatcggctggcggcaccgtttctttcgatcccaatattcgcaaagagatgctgagcattcctgaaatggcgcaggctctcgattatttgattgaatatacggatatttttatccccagcgaaagcgaactccctttcttcgcgcgtcacaaaaatctgtcagaggaacagattgttagcgatcttctccacggcggcgtaaaacatgtggcgataaaacgcgcccagcgtggggccagctattacaagcttaaaaacggtacattacacgcccagcatgttgcaggtcacgatatcgaaattatcgatccaacgggtgcaggcgactgctttggcgcaacgtttatcactcttttcttatccggtttcccggcacacaaggcgctgcaatatgcaaatgccagcggcgcgctcgccgtaatgcggcaaggtccgatggaagggatatcctcactggcagacattgaagactttttgcagcagcactgaacggcaattttctgtcagattattttccctgcctgaagacttgccgtagaattgcccgtttctcgtatccccccatgaggaggaccccttccgtggacactcgttttgttcaggcccataaagaggcgcgctgggcgctggggctgacccttttgtatctggcggtatggttagtagccgcttacttacctggcgttgcccccggttttaccggctttccacgctggtttgagatggcttgcatcctgacgccgctgctgtttattggactgtgctgggcgatggtgaaatttatctatcgcgatatcccgctggaggatgacgatgcagcttgaagtgattctaccgctggtcgcctatctggtggtggtgttcgggatttcagtttatgcaatgcgtaaacggaacaccggcaccttcctcaatgagtatttcctcggcagccgctctatgggcggtattgtgctggcgatgacgctcaccgcgacctatatcagtgccagttcgtttatcggcgggcctggagctgcttataaatacggcctggggtgggtattgctggcgatgattcagcttcctgcagtctggctttcgctcggtattctcggcaagaagttcgcaattcttgcgcgccgctacaatgcggtgacgctgaacgatatgctgtttgcccgctaccagagtcgtcttctggtgtggctggcgagtttgagtttgctggttgcgttcgttggtgcgatgaccgtgcagtttatcggcggtgcgcgcctgctggaaaccgcggcgggtattccttatgaaaccgggctgctgattttcggtatcagcattgcgttgtataccgcctttggcggctttcgcgccagcgtgctgaacgacaccatgcaagggctggtgatgctgattggcaccgttgtgctgcttattggcgtggtacatgccgcaggtggtttaagtaatgcggtagacacgctgcaaaccatcgatccgcaactggttacgccacaaggcgctgacgatattctgtcgcctgcctttatgacgtcgttctgggtactggtgtgctttggcgttataggcctgccgcatactgcggtgcgctgtatctcttataaagacagcaaagccgtacatcgggggatcattatcggtacgattgtagtcgcaatcctgatgttcggtatgcatctggccggagcgttaggtcgggcggtgatccccgatctcaccgtaccggatctggtgatcccgacgttaatggtaaaagtgctgccaccgtttgccgccgggatcttcctggctgcaccgatggctgcgatcatgtcgacaattaacgcccaactgctgcaaagttccgctacgatcattaaagatctctatctgaatatccgtccggatcaaatgcaaaacgagacgcgtctgaagcggatgtcggcggtgatcacgctggttctcggtgcgttgctgctgcttgccgcctggaagccgccagaaatgatcatctggctgaatttgctggccttcggtgggctggaagccgttttcctgtggccgctggtgctgggtctttactgggaacgtgccaacgccaaaggcgcgctaagtgcgatgatcgttggcggcgtgctgtatgccgtactcgcgaagctgaatattcagtacctgggcttccaccctatcgtgccctcgttactactaagtttgctggctttcctggtcggaaaccgtttcggtacatccgtcccgcaagctaccgttttgactactgataaataaagagttttgccatgccttggatccaactgaaactgaacactaccggcgcgaacgcggaagatcttagcgatgcgctgatggaagcgggtgccgtttctatcacttttcaggatacccacgatacgccagtatttgagccgctgccgggcgaaacgcgcctgtggggcgacaccgatgtgattggtctgttcgacgctgaaaccgatatgaacgacgtggtggcgattctggaaaaccatccgctgctcggcgcgggcttcgcgcataaaatcgaacaactggaagataaagactgggagcgcgaatggatggataatttccacccgatgcgctttggtgaacgactgtggatctgcccaagctggcgtgatgtgccggacgaaaacgccgtcaacgtgatgttagacccagggctggcgtttggtacgggtacccatccaactacctctctgtgcctgcaatggctcgacagcctcgatttaaccggtaaaacagtcatcgactttggctgcggttccggcattctggctatcgcggcgctgaaactgggtgcagcaaaagccattggtattgatattgatccgcaggcgattcaggccagccgcgacaacgctgaacgtaatggcgtttctgatcgtctggaactctacttaccgaaagatcagccagaagaaatgaaagccgacgtggtggtcgctaacatccttgcaggtccattacgtgaactggcaccgttaatcagcgtcctgccagtttcaggcggtttgctgggcctttccggtattctggcaagccaggcagagagcgtttgcgaagcttatgccgacagcttcgctctggacccggtcgtggaaaaagaagagtggtgccgcattaccggtcgtaagaattaaccttcgcatcgccgtatggcgacgcagagcgaagtgcgagcgatgtcacaaaaggcacgttaatttgccgattatttacgcaaatttgcgtgccaaaattttcattcataaagaaaaattgagaacttactcaaatttctttgagtgtaaattttagtcactattttctaatatgatgatttttatgagtaattatcgcgctacgctcattttaaatgcaattctttgatccatctcagaggattggtcaaagtttggcctttcatctcgtgcaaaaaatgcgtaatatacgccgccttgcagtcacagtatggtcatttcttaactcatgcgcatcggacaatatcagctcagaaatcgcctgatcgcagcgcccatggctggcattacagacagaccttttcggacgttgtgctacgagatgggagccggattgacagtatccgagatgatgtcttctaacccacaggtttgggaaagcgacaaatctcgtttacggatggtgcacattgatgaacccggtattcgcaccgtgcaaattgctggtagcgatccgaaagaaatggcagatgcagcacgtattaacgtggaaagcggtgcccagattattgatatcaatatgggttgcccggctaaaaaagtgaatcgcaagctcgcaggttcagccctcttgcagtacccggatgtcgttaaatcgatccttaccgaggtcgtcaatgcagtggacgttcctgttaccctgaaaattcgcactggctgggcaccggaacaccgtaactgcgaagagattgcccaactggctgaagactgtggcattcaggctctgaccattcatggccgtacacgcgcctgtttgttcaatggagaagctgagtacgacagtattcgggcagttaagcagaaagtttccattccggttatcgcgaatggtgacattactgacccgcttaaagccagagctgtgctcgactatacaggggcggatgccctgatgataggccgcgcagctcagggaagaccctggatctttcgggaaatccagcattatctggacactggggagttgctgcccccgctgcctttggcagaggttaagcgcttgctttgcgcgcacgttcgggaactgcatgacttttatggtccggcaaaagggtaccgaattgcacgtaaacacgtttcctggtatctccaggaacacgctccaaatgaccagtttcggcgcacattcaacgccattgaggatgccagcgaacagctggaggcgttggaggcatacttcgaaaattttgcgtaaacagaaataaagagctgacagaactatgttcgaacaacgcgtaaattctgacgtactgaccgtttctaccgttaactctcaggatcaggtaacccaaaaacccctgcgtgactcggttaaacaggcactgaagaactattttgctcaactgaatggtcaggatgtgaatgacctctatgagctggtactggctgaagtagaacagcccctgttggacatggtgatgcaatacacccgtggtaaccagacccgtgctgctctgatgatgggcatcaaccgtggtacgctgcgtaaaaaattgaaaaaatacggcatgaactaattcaggttagctaaatgcttgattaaaaaggcgctactcggcatggggaagcgccttttttataggtgtcacaaagggagtgaccatgagaacaggatgtgaaccgacccgatttggtaatgaagcaaagaccatcatccagggtgatgcattaaccgaacttaaaaagctccccgccgaaagtgtcgatctgatctttgccgacccaccgtataacatcggtaaaaattttgatggtctgatcgaagcctggaaagaagatctgtttatcgactggctgtttgaagtgattgcagagtgccatcgcgttctgaaaaagcagggcagcatgtacatcatgaatagcacggaaaacatgccctttatcgatctccagtgccgcaagctttttaccatcaaaagtcgcatcgtctggtcatatgacagttctggagtgcaggcgaaaaaacactacggctccatgtacgaacccatcctgatgatggtgaaagacgcaaagaactacacgttcaacggtgatgctattctggtagaagccaaaaccggatcgcagcgcgcgttgatcaattatcgcaaaaatcctccacagccttacaatcatcaaaaagtaccgggtaacgtctgggattttccgcgcgtgcgttatttgatggatgaatatgaaaaccacccgacgcaaaaaccggaagccttgctgaaacgcattattctcgcctcttccaacccaggcgatatcgttctcgacccgtttgccggtagctttactaccggtgccgtagccgtcgccagcgggcgaaaattcattggtattgagatcaacagcgagtacatcaaaatggggcttcgacggctggatgtcgcgtcgcattactctgcggaagaactggcgaaagtgaaaaaaagaaagaccggcaacctgtcaaaacgaagccggttaagcgaagttgaccccgatctcattgcaaagtaaaggaagtgtaagcctggttttcagattattcatttcgtgtatatttcctgccagacttggttaaacatgcacaggctcaggtaatgattcgcaagtattggtggctcgtcgttttcgctgtcttcgtttttctgtttgatactttactgatgcagtggattgaactgctggcaacagaaacagacaaatgccgcaatatgaactcagttaatccactaaaactggttaactgtgacgaactgaattttcaggacagaatgtgaatttatatgacacttaattcattcgttttatgaattaatttcgttatgttttcatctggcatgaacattcttaatacgttatcgaccagagcgggggcttgtttataaagatcataacccgccatattcattaaccagttttgaacaattccgctgaaggcaccatcaataataatcatcacaacatctaaatcgagattatttgctacacaaccttgttgctgacacgcctgcaatacttcgcggagagtctgcggattaaagcccatcttttcgcgtatcactccctcggccagcatctcatcattaaattcacatttgtgatataagattttcagcaacgcctgctggcggggaattttggcaatatattgcaaaccgacaatcaatttttcacgcaattgctgaaacgggtcatgctctaacccagcggtcaagtgatcctggattaactcccgcaatgaaggctgttgcaaccacatctcattaaacagttgagtcttgttttcgaagtgccagtagatagcgccacgcgtaacgttagcagcgtcggcaatgtcgttgagcgtcgtcttgcttacgccatgctgcgcaaactgggcgatggcagtttcaatcagttcttgccgggtcttcagggcttcagctttggttctttttgccatgattaattattcaggaaataaatatattcgacacaggatgagaaaatagcgaaggttaatctatcacctaatgtgtatttatacgagaggctaatattgcgttgctataaatcgtcaaataaatgatatgtattatttacataaaatacattcacttgacctatacatatttcaatttacgagattttaattctatttctttcattccgcgtcaaaacaaaacagtagaatattaatctttttttgtgtttatgtgccttgagttgccagtattcataactattccttacatcgacgaatgataatttgtaggatagcgaactgtatttttctttctgcgagttaacgcattgcctttttgggcaaataacgcgcttttggttttttgaggaatagtaatgacgaaacatgccaggtttttcctcctgccctcctttattctgatctccgcggctttaatcgccggttgtaacgataagggagaagagaaagctcacgtcggtgaaccgcaggttaccgttcatattgtgaaaacggccccgttagaagttaagactgaattaccaggccgcaccaatgcttaccgtatagccgaagttcgcccacaggttagcgggatcgtactgaatcgcaatttcactgaaggcagcgatgtgcaagcaggccagtccctgtaccagatcgatcccgcgacctatcaggcaagttatgacagcgcgaaaggcgaactggcgaaaagtgaagccgccgccgccatcgcgcatttgacggtaaaacgttacgttccgctcgtgggtacgaaatacatcagtcagcaggagtacgaccaggccattgctgatgctcgccaggccgatgccgccgtgattgccgcaaaagccacagtcgaaagcgctcgcatcaatctcgcttataccaaagtgactgcgccaattagcggacgtatcggcaaatcgaccgtgaccgaaggcgctcttgtcactaatgggcaaacgactgaactggcgactgtccagcagctcgatcctatctacgttgatgtgacccaatccagcaacgattttatgaggctgaagcaatccgtagagcaaggaaatttgcataaggaaaacgccaccagcaacgtagagttggtcatggagaacggtcaaacctatcccctgaaaggtacgctgcaattctccgatgtgaccgttgatgaaagcaccggctccataaccctacgtgctgtcttccctaacccgcaacatacgcttttgccgggtatgtttgtgcgcgcacggattgatgaaggcgtccaacctgacgccattcttatcccgcaacaaggcgttagccgcacaccacgtggtgatgcaaccgtgctgattgttaacaataaaagtcaggttgaagcgcgccctgtcgttgccagtcaggcgattggcgataaatggttgattagcgaaggtctgaaatctggcgatcaagtcattgtcagcggcctgcaaaaagcgcgtccgggagagcaggttaaagccactaccgatacccccgcagatactgcatcgaagtaaggcaatctgacatggcaaacttttttattcgacgaccgatatttgcatgggtgctggccattattctgatgatggcgggcgcactggcgatcctacaattgcccgtcgcccagtatccaaccattgcgccgcctgcggtttctgtttcggcaaactatccgggtgctgatgcgcagaccgtgcaggatacagtgacgcaggttatcgaacagaatatgaacggtatcgataacctgatgtatatgtcctccaccagcgattccgccggtagcgtgacaattacccttaccttccagtccgggaccgatcctgatatcgcgcaagtacaggtgcagaacaaactccagctcgccacgccgttgctgccgcaggaggttcagcagcaggggatcagtgttgaaaagtccagtagcagctatttgatggtggcgggctttgtctctgataaccctggcaccacacaggacgatatctcggactatgtggcctctaacgttaaagatacgcttagccgtctgaatggcgtcggtgacgtacagcttttcggcgcacagtatgcgatgcgtatctggctggacgccgatctgctaaacaaatataaactgacaccggttgatgtgattaaccagttgaaggtacagaacgatcagatcgctgccggacagttgggcggaacgccagcgttaccagggcaacagttgaacgcctcgattattgctcagacgcggttaaaaaatccggaagaattcggcaaagtgaccctgcgcgtaaacagtgacggctcggtggtgcgtctgaaagatgtcgcacgggttgaacttggcggtgaaaactataacgttatcgctcgcatcaacggaaaaccggcggcgggcctggggattaagctggcaaccggcgcgaatgctctcgataccgcgaaagccattaaggcaaaactggcggaattacagccattcttcccgcagggaatgaaggttctttacccttatgacaccacgcctttcgtccagctttctatccaggaagtggtgaaaacgctgttcgaagccattatgctggtattcctggtgatgtatctgttcttgcagaacatgcgggcaacattgatacccaccattgctgtacctgtcgtgttgttagggacatttgccatactcgccgcttttggttactccatcaatacgctaacgatgtttgggatggtacttgccatcggacttcttgttgatgatgcgatagtcgttgtggagaacgtcgagcgcgtaatgatggaggataaactcccccccagagaagcgacggaaaaatcgatgtcgcaaatccagggcgcgctggtaggtatcgcgatggtactgtcggcggtatttattccgatggcattcttcggtggctcaacaggggcaatttatcgccagttctctatcactattgtttcagcaatggcgctttcagtactggttgcgctgattctcacccccgcgttatgtgcaacattgctgaaaccagtctctgccgagcatcacgaaaataagggaggattcttcggctggtttaacaccactttcgatcatagcgttaatcactacaccaatagcgttggcaaaatcctcggttccacagggcgatatttactgatctatgcgctgattgttgcaggaatggtggtgttgtttttacgtcttccgtcttccttcttacctgaagaggatcagggtgtctttctgaccatgattcagttacccgctggcgcgacgcaagagcggacgcaaaaagtgttggatcaagtgacggattactatctgaagaacgagaaagcgaacgttgaaagtgtctttacagttaacggctttagcttcagcggccaggcacaaaacgccggtatggccttcgtcagtctgaaaccgtgggaagagcgtagtggtgacgaaaacagtgcggaagcagtaatccatcgtgccaaaatggaattgggcaagatccgcgacggttttgtcattccatttaatatgccagccattgttgaactgggcacggcaacgggtttcgactttgagttaattgatcaggctgggctgggtcacgatgccctgacccaggcccgtaaccagttgcttggcatggcggcgcaacatcctgccagcttagtcagcgtgcgccctaatggcctggaagacaccgcgcagtttaaactggaagttgaccaggaaaaggcgcaggcattaggtgtttcactttctgacatcaatcagaccatttcaacggcgttgggtgggacttacgttaacgacttcatcgaccgtggtcgcgtgaaaaaggtgtatgttcaggcggatgccaaattccgtatgctgccagaagatgtcgataaactttatgtccgcagcgccaacggcgaaatggtgccattctctgcctttaccacttcacattgggtgtatggctctccgcgactggaacgctacaacggtctgccgtcaatggagattcagggggaagccgcgccaggaaccagttccggcgatgctatggcgttgatggaaaaccttgcgtcaaaattaccggcgggcattggttatgactggacgggtatgtcatatcaggaacgtttatcgggaaaccaggctcccgctctggtagcaatttcctttgtggttgttttcctgtgccttgctgcactctatgaaagctggtcaattcctgtctcggttatgttggtcgtgccgttagggattgtcggcgtgctactggcggcaacactctttaatcaaaaaaatgacgtctactttatggtgggcttgctaacgacaattggcttgtcggccaaaaacgctattttgattgttgagttcgctaaagatctcatggagaaagagggtaaaggtgttgttgaagcgacactaatggcagtacgtatgcgtctgcgtcctatcctgatgacctctctcgcctttattctcggcgtattaccgctggctatcagtaacggggccggcagtggcgcgcaaaacgcagtcggtatcggggtaatgggcggaatggtctctgcaacgttgctggcaatcttcttcgtgccagtgttctttgtggtgatccgtcgatgctttaaaggataaatcagaaacataaaggcgctttcaggcgccttttttattttcagtgaaccccataaaaattaataagatattcttcttctcactctttaaaaactttctatagttcccgctcccttcactatttttacaattcacataaattgtcattattcattccgcaagatttataacctccagtgataaaatggcattcagctcgttaataagagagttaacttattaagcgttagcgtttattactgaggtaacaccatgaaaagattaattcctgtgacattgctcaccgcattgctggcgggctgtgctcacgattcgccctgcgttccggtttatgacgatcagggtcgtctggttcacaccaatacctgtatgaaaggcacgactcaggataactgggaaacggctggggctattgccggcggggcagcagctgttgctggcctgacgatggggatcatcgctctgtcgaaataactaaacagggcgcggagctccgcgctctttttaacgatacagtatctttccataagataaaatattgctatattctgctgggtaattccctgctgatttagcatgttatatcacgttatttcgctgctttcgaaataacgcatcaatttaactttcacacatcccaccagaaatatactcacgctaataatcattattctgcttagtaaaaaacgcgtaaatattttgcgccaaaatgtggcgcatgttccattttcgcaccattgcggggcgctgtttttattatttcctgtctacactcagcttattgcgacgcgaaatcgtgcgcaaaagctggcactacttttgcttataagaggatggccacagacaggtaaaagacgtttcccaaacgtcctataacgataattttcgcctcacaggaagcattatgaaaaagatgatgatagccacactggctgccgccagcgtgctgcttgccgttgcaaatcaggcgcatgctggcgcgacgcttgatgccgttcagaaaaaaggttttgtgcaatgcgggatcagtgatggattacctgggttctcttatgccgatgctgacggtaagttttcaggtattgatgtagatgtttgtcgtggcgttgccgctgctgtattcggtgacgatacgaaagtgaaatataccccgctcactgcaaaagaacgcttcaccgctttacagtcaggggaggtggatttgctctcccgtaatacgacctggacttcatctcgcgatgccgggatgggaatggcatttactggcgtcacttattacgacggcattggcttcctgacgcacgataaagcggggctaaaaagcgcgaaagaactggatggcgctaccgtctgcattcaggcggggactgataccgaactcaacgtcgccgattacttcaaggcaaataatatgaagtacacgccagtaaccttcgatcgctcagacgaatcagcgaaggctctggaatcgggccgctgcgatactctggcctcggatcaatcacaactgtatgccctgcgcatcaaattaagcaacccaactgaatggattgtcttaccggaagttatctctaaagaaccacttgggccggtagttcgtcgtggcgatgatgaatggttctcgattgtacgctggacgcttttcgccatgctgaatgctgaagagatgggcatcaattcccagaacgtcgatgaaaaagcggctaatccagcaacgcctgatatggcacatctgctgggtaaagaaggcgattacggcaaggatctgaagctggataataaatgggcctttaacatcatcaaacaggtgggtaactactcggaaattttcgagcgtaacgtaggttcagaaagcccgctgaaaattaaacgtgggcaaaataatctatggaataacggcggtattcagtacgcgccgcccgtgcgttaagtcggtgtgaggtaacgagcgtcgctacggcggcgctctcttcagcgttatgctttccgaggtttctatgtctcatcgccgctcaaccgttaaaggctcactctcttttgccaaccctacggttcgcgcctggttattccagatccttgccgttgttgctgttgtcggcattattggttggttatttcacaacactgtaacgaatctcagtaatcgcggcataacatcaggatttgcttttcttgaccgcggggccggttttggcatcgttcagcatttgattgattatcagcaaggcgacacttacggacgcgtttttattgtcggcctgctcaatacgctactggtttctgcattgtgtattgtgttcgcttctgttttgggcttctttatcggtctggcgagactttcggataactggctgctacgaaagctttccacaatttatattgagatcttccgtaatattccgccattgctgcaaatcttcttctggtactttgccgtattgcgcaatttgcccggaccacgacaggcagtgagcgcactggatttggtgtttctgagcaatcgtgggctttatattccgtcgccgcagctgggagataggtttcttgcgtttatcctggctgttgttatagctatagtcctttctgttgggctattccgctttaataaaacacaccagataaagaccggacagctgcgccgcacctggccgatcgccgcagtgttgatcattggtttgcctttactggcgcaatggctttttggcgcagcactacactgggatgtcccagccctacgaggctttaacttccgcggcgggatggttttaattcctgaactggcagccttaacgctggcactttcggtttatacctctgcatttatcgccgagattatccgcgctgggatccaggcagtgccttatggtcaacatgaagctgctcggtcactgggattacccaacccggttacgctacgccaggtcattattccccaggcactgcgggtgattattccaccgttaaccagccagtatctcaacatcgtcaaaaactcctctcttgccgccgcgattggctatcccgatatggtttcgctgtttgctggcaccgtgctgaaccagacggggcaagccatcgagacgatagccatgaccatgtcggtctatctgattatcagcctgactatctcgctgctgatgaatatctataaccgccgcatcgcgatcgttgaacgctaaggagtcatgatgacaaaagtattgctgtctcatcccccgcgcccggcgagccataactcaagccgcgcgatggtgtgggtgcgaaaaaatctgttctccagcttgagcaatagcctactgactattggctgcatatggttgatgtgggaactgatcccaccgttgctgaactgggcatttttgcaggctaactgggttggctcaacgcgtgccgactgcacaaaagccggtgcctgttgggtcttcatccacgaacgatttggtcagtttatgtatgggctttacccacacgaccaacgctggcgaattaacctcgcattactgattgggcttgtgtcgatcgcaccaatgttctggaaaatactcccgtatcgcggtcgctatattgcggtatgggcggtgatttacccactgattgtctggtggctgatgtatggcgggtttcttggtcttgagcgggttgaaacccggcaatggggcgggctgacgctaactttaattattgcatcagttgggattgcgggggcgctgccgtgggggatcttactggcgttaggtcgccgctcccatatgccgattgtgcgtatcttatcggtcatttttatcgagttctggcgcggcgtaccgctgattaccgtattgtttatgtcttcggtcatgctgccgttgtttatggcagaagacaccagtatcgacaaattgatccgcgcgctggttggcgtgatcctgtttcagtcagcatatgttgcggaagtcgtgcgaggcggattacaggcgctgcctaaagggcaatatgaagcggcagagtcgctggcgttgggttactggaaaacccaggggctggttattatgccacaggcgttgaagctggtgattcctgggctggtaaataccatcatcgcactcttcaaagataccagcctggtgatcatcatcgggttgttcgatcttttcagtagcgttcagcaggcaaccgttgatcccgcctggttgggtatgtcgacggaagggtatgttttcgccgcgctgatctactggatcttctgtttcagcatgtcacgttatagccaacatctggaaaaacgttttaacaccgggcgtacaccgcattgaggacactatgagccaaattttactgcaacctgctaacgcgatgattacgctggaaaacgtcaataaatggtatggacaattccatgttttgaaaaatataaatttaaccgtgcaaccgggagaacggatcgttctgtgtggcccttctggttccggtaaatcgacaaccattcgttgtattaatcatctggaagaacatcaacagggacggatcgtggtggatggcatcgaacttaatgaagatatccgcaatattgagcgcgtcaggcaggaagtgggaatggtctttcagcatttcaatctcttccctcatctgaccgtgttgcagaactgtaccctggcaccgatttgggtacgcaagatgccaaagaaagaggctgaagctctggcgatgcattaccttgagcgggtgagaattgccgaacatgcccagaagtttcccggacagatttctggtggtcagcagcaacgtgttgccatagcacgttcgctgtgtatgaagccgaaaattatgttgtttgatgagccaacgtcggcgctcgatcctgagatggtgaaagaggtgctggatacgatgattgggctggcgcagtcgggtatgacaatgttgtgtgtaacacatgagatggggtttgcacgaaccgtcgctgaccgggtgatttttatggatcgtggggaaatagtggagcaagctgcacctaatgaattttttgcgcatcctaaatcagagcgtacgagggcatttttatcgcaggtaatccattaattgaatgttagttcgaaaagcaaaaaggccatcctttcggatggcctttcgcttgatttgatgtctggcagttccctactctcgcatggggagaccccacactaccatcggcgctacggcgtttcacttctgagttcggcatggggtcaggtgggaccaccgcgctactgccgccagacaaattcttttctaatctgccgaactttaacctaaaaagtggtgctgatacccagagtcgaactggggacctcacccttaccaagggtgcgctctaccaactgagccagtatcagcacgctaaatttgatgcctggcagttccctactctcgcatggggagaccccacactaccatcggcgctacggcgtttcacttctgagttcggcatggggtcaggtgggaccaccgcgctaaggccgccaggcaaattctgttccattaacccgcttgtcgccggttaatctaatctgtatcaggctgaaaatcttctctcatccgccaaaacatcttcggcgttgtaaggttaagcctcacggttcattagtaccggttagctcaacgcatcgctgcgcttacacacccggcctatcaacgtcgtcgtcttcaacgttccttcaggacctcagaccagctagggatcgtcgcctaggtgagcctttaccccacctactagctaatcccatctgggcacatccgatggcaagaggcctgaaggtccccctctttggtcttgcgacgttatgcggtattagctaccgtttccagtagttatccccctccatcaggcagtttcccagacattactcacccgtccgccactcgtcagcaaagcagcaagctgctttctgttaccgttcgacttgcatgtgttaggcctgccgccagcgttcaatctgagccatgatcaaactcttcaatttaaaagtttgatgctcaaagaattaaacttcgtaatgaattacgtgttcactcctgagacttggtattcatttttcgtcttgcgacgtcaagaatccgtatcttcgagtgcccacacagattgtctgataaattgttaaagagcagttgcgacgcggctttcagctcactgtcgcgaggtggcgtatattacgctttcctctctcagagtcaaccctgaatttcaggatttttctctttgttgttacgactatcttgttctgccgaactttaacctaaaaagtggtgctgatacccagagtcgaactggggacctcacccttaccaagggtgcgctctaccaactgagccatatcagcacgctaaatttgatgcctggcagttccctactctcgcatggggagaccccacactaccatcggcgctacggcgtttcacttctgagttcggcatggggtcaggtgggaccaccgcgctaaggccgccaggcaaattctgttccattaacccgcttgtcgccggttaatctaatctgtatcaggctgaaaatcttctctcatccgccaaaacatcttcggcgttgtaaggttaagcctcacggttcattagtaccggttagctcaacgcatcgctgcgcttacacacccggcctatcaacgtcgtcgtcttcaacgttccttcaggactataatctgtatcaggctgaaaatcttctctcatccgccaaaacatcttcggcgttgtaaggttaagcctcacggttcattagtaccggttagctcaacgcatcgctgcgcttacacacccggcctatcaacgtcgtcgtcttcaacgttccttcaggacaccgggcagtgcattggcatgacaacccgaacaccagtgatgcgtccactccggtcctctcgtactaggagcagcccccctcagttctccagcgcccacggaccgaactgtctcacgacgttctaaacccagctcgcgtaccactttaaatggcgaacagccatacccttgggacctacttcagccccaggatgtgatgattcgtgcaggtcggaacttacccgacaaggaatttcgctaccttaggaccgttatagttacggccgccgtttaccggggcttcgatcaagagcttcgcgttaccgctaaccccatcaattaaccttccggcaccgggcaggcgtcacaccgtatacgtccactttcgtgtttgcacagtgctgtgtttttaataaacagttgcagccagctggtatcttcgactgatttcagctccacgagcaagtcgcttcacctacatatcagcgtgccttctcccgaagttacggcaccattttgcctagttccttcacccgagttctctcaagcgccttggtattctctacctgaccacctgtgtcggtttggggtacgatttgatgttaccttctccgtccccccttcgcagtaacaccaagtacaggaatattaacctgtttcccatcgactacgcctttcggcctcgccttaggggtcgactcaccctgccccgattaacgttggacaggaacccttggtcttccggcgagcgggcttttcactggttcactatcggtcagtcaggagtatttagccttggaggatggtccccccatattcagacaggataccacgtgtcccgccctactcatcgagctcacaatatgtgcatttttgtgtacggggctgtcaccctgtatcgcgcgcctttccagacgcttccactaacacacacactgattcaggctctgggctgctccccgttcgctcgccgctactgggggaatctcggttgatttcttttcctcggggtacttagatgtttcagttcccccggttcgcctcattaacctatggattcagttaatgatagtgtgtcgaaacacactgggtttccccattcggaaatcgccggttataacggttcatatcacctcaccgacgcttatcgcagattagcacgtccttcatcgcctctgactgccagggcatccaccgtgtacgcttagtcgcttaacctcacaacccgaagatgtttcgttgcgaaaatttgagagactcacgaacaactctcgttgttcagtgtttcaattttcagcttgatccagatttttaaagagcaaaacttcgcagtgaacctttgcaggtacactctgaagtattttttatttaatcactacagagatggtggagctatgcgggcttgatccagatttttaaagagcaaatatctcaaacatcacccgaagatgagttttgagatattaaggcaggtgactttcactcacaaaccagcaagtggcgtcccctaggggattcgaacccctgttaccgccgtgaaagggcggtgtcctgggcctctagacgaaggggacgtgtcagtctgcttcgcaagacgccttgcttttcactttctatcagacaatctgtgtgagcactgcaaagtacgcttctttaaggtaaggaggtgatccaaccgcaggttcccctacggttaccttgttacgacttcaccccagtcatgaatcacaaagtggtaagcgccctcccgaaggttaagctacctacttcttttgcaacccactcccatggtgtgacgggcggtgtgtacaaggcccgggaacgtattcaccgtggcattctgatccacgattactagcgattccgacttcatggagtcgagttgcagactccaatccggactacgacgcactttatgaggtccgcttgctctcgcgaggtcgcttctctttgtatgcgccattgtagcacgtgtgtagccctggtcgtaagggccatgatgacttgacgtcatccccaccttcctccagtttatcactggcagtctcctttgagttcccggccggaccgctggcaacaaaggataagggttgcgctcgttgcgggacttaacccaacatttcacaacacgagctgacgacagccatgcagcacctgtctcacgctcagaccagctagggatcgtcgcctaggtgagcctttaccccacctactagctaatcccatctgggcacatccgatggcaagaggcctgaaggtccccctctttggtcttgcgacgttatgcggtattagctaccgtttccagtagttatccccctccatcaggcagtttcccagacattactcacccgtccgccactcgtcagcaaagcagcaagctgctttctgttaccgttcgacttgcatgtgttaggcctgccgccagcgttcaatctgagccatgatcaaactcttcaatttaaaagtttgatgctcaaagaattaaacttcgtaatgaattacgtgttcactcctgagacttggtattcatttttcgtcttgcgacgtcaagaatccgtatcttcgagtgcccacacagattgtctgataaattgttaaagagcagttgcgacgcggctttcagctcactgtcgcgaggtggcgtatattacgctttcctctctcagagtcaaccctgaatttcaggatttttctctttgttgttacgactatcttgtgaagtgtttcacgttgtcgtctcaacggaggcgcattatagggatcccaattttttgcacaagtacttttttgatctttttttctgtttgttgttttttcaccctttttgctgcattcgcacacaaaacggtgcttttttgcatactaaaagacttgcacaaggccaataatgtacccaaagtcattagtaaatcatttattgttgaggtgagtatgtctgatgttttacgcccataccgcgatctttttccacaaatcggtcagcgcgtaatgatcgacgatagcagcgtcgtgattggtgacgttcgtctggctgatgatgtggggatctggccgctcgttgtgattcgtggagatgtacattatgtacagatcggagcacgcaccaatatccaggatggcagtatgttgcatgtcactcataaatcctcgtacaacccagctggcaacccattaaccattggcgaagatgtcactgttggtcacaaggtgatgctccacggctgcaccattggcaatcgagttttggttgggatgggctcaattttacttgatggcgcaatagtagaagatgatgtgatgattggtgcgggtagcctggtcccacaaaataaacggctggagagcggatatctgtatctcggtagccccgtcaaacagatccgcccgttaagtgatgaagagaaggctgggttacgctattccgcaaataactacgtgaaatggaaggacgaatatatggatcagggtaaccacacccaaccttgatcatcttcactttgttcctgaattaagttttccgcttcttcttccaggtcccagcgatgctgacgaaaactcgctaaccactgttctggcgtatctccagtaaagcgatacgccagactctcgccagagatcgcacatgtcagttgcataccattcacgagagcgggaaaacatacacattttttactctcgttccactcttccctatccggaaactggatggcctgattcacgctgacaactcctgttgcaatagtttgatgaccggttctacatcaggcagaacgccatgccaaagaaggaaggcatgagccgcttgtgccaccagcattcctaaaccatcagcagtacgttttgagcctcgctgctcacaccatgccagaaaaggagtttttcctttctgatagaacatgtcatagcaataaatgcctggatgaatgagcgatggcgggatcgccggaatatcaccactgatgccactggatgttgcattaataatgagatcaaactcatgaccttccagttcgtccatacccaacgcgtgaatactgccagtgtgcgcaaacaatttagccaactcttccgcgcgggataccgtccgattagtgattgtcaccgcacagtccagggaaaggagtggcagtagtacgccgcgagatgctccaccagcgccaatgagcagaatacgtaaaccaggacggataaaagacagacgttccagatcgcttaacaaacctataccatcggtattgtcacccagcaggcgtccatcttctaaccgcttgagggtattaacagcaccagccaacgctgcccgttcagtaagctcatccgctctggcaaaagcctcttctttaaaaggtaccgtcacattcgcacctttaccaccagcactaaagaaagtgttcagtgtgttgatgaaatcattgatgggtgccaacacacgcccatagggatgttcaatattcagttgctgagcaaattgctgatgaatgaatggcgatttgctgtgggctatcggattaccaaaaacagcataggtttccattatgttacccctgtcgaaacagttcacccgtcagggcatcgcggatttctgaaggatttaaacgcccccccgtttcaccaggcacaaccgggaacgcagcgccaaattgtgcgcgaacttcgtctactgttcgacaaggtggcaatccactcaagttggcactggtagaaaccagcggtttaccataagcctggcacaaagcaaccaccaacggatggtcggtgactcgtacagcaagcgaatcaaagcggcccgtcaaccagcgcggtgttgtcgcaggcgcgggaaagacaaaggtgacaggacctggccagcgggaaaaaatggtttcacgctgcgcgtcagtcagcatggtgtcatcaatatagggtttaagctgctcgtaatttgccgcgattaaaatcagccccttatcaaccggacgccgttttaactccaacagtctcatcactgctgtttcgctatcaggatcgcacccgacaccgaaaacggcttccgttggataggcgatgacacgttcttcattgaggacatctatcgcagctgcgatagcgtctccttgcaggttattattcacgttattattccgccgaaatcggctttccacattgtttactggcacaaaagtgttttacaccctgcgcggttttcttttcgatgagtagcggataatggcactcagggcattctccagctatgggtttgaagttaatggcaaattgacactccgggtagcgatcacaggagtgaaatgttttgccataacgggagcggcgctgaaccagatggcccgtccggcattgggggcatgtaattgctgtttcgtccggtttatcgataagttcggtatgttcgcattcagggtagttactgcaaccaataaacataccaaagcgtccctggcgtaataccagatttgcgccacatgcagggcaaacctgcccctccagaactttgacaatatgtccatccgctgaagatttcagaggacggacgtagtcacacgccggatactgtgagcatccaagaaacggaccgtgtttcccggatcgaataactagttcagccccgcactttgggcaggactcattattacgcaccgtgaacagtgctgatttcgccataactacttatgctgaattaaagaaatgattaatgcagcataccttcattcacttcaaagagtaattcttccatttgctggtacgcattttcgcagcccggaatattgaacaacaccatcaggattacccatttcaggtcttccaggtcgaactcagcggtatccagcgcgagcactcgctctatcaccatttcacgggtttcaaggttaagcacctgaatttgctcaaggaaaagcagaaaaccacgacagctggcatccagtctttcacactcttcaggggtataaatacgcatggagagtggatcagaggccagttgcatcggttctgccagtccttcctgataatccgcaagcttttccagccaaagcagggcattatagatatcttctcgatcaaatcctgcgtcggtaagatcctgttcaagtttgtcttgatccacacgcaactcagcttctgtgtgaatataggtttcaaacaaatacattagtacgtcgaacatggcatgccctcctcaatcggacatagccgccgggtacagctgcgatccatcctgctaactccagttcgagtagttgagtaactacctctggcacaggttggccggcacgttcagcgacgacgtcaacaggtgttacctcatctcctacgttagccaggagctcaggaaatggcaatgccacgtcttcctgatctggtgaataaaatgaattttcaggggcgtctggcaaccagtgcaatccaaattgcaagttttccagaatttcttccggttccgtcacaagaatcgcaccttgttttattaaccagtgaggcccttcgcttcccggattccctattggacctggcaaagcaaaaacttcacgcccctgctcaagcgcacaacgtgctgtcaccagcgaaccactgcgcaaagccgcttccaccaccagtacacctttacttagaccactgataatgcgatttcttcgtgggaaattgtaagcaaggggtggaacatcgaggggaaattccgagacgagagcaccaccttgctcaagtagactggcagccagtggagcatggcggcggggatgaatggtattaagtccattccccaatacagcaatgctaacgccatttacctgtaaggccgctttatgcgccacaccatcgattccacgcgccagtccactcgtaattgtcactccacgcgtcgccagagtttcgcaaaataatcgtccccatcgctcgccataccatgaatgcgcccgactccccactacggcaagctgaaatgaatgcaacgcgtgcagttctccttcaacaaacagtgcgccggggtaatctgtcgtcgccagaagttgaggaggataaaattcgctgtccgcagggattaaatgatggttgggttgctccaaccaacaaagtgagctttcgatactctttcgcggaaatgaaagaaagcgttgtgcctgccgcaatgtaagccctgtttgctgcaatacaaccgcatcaatatgcgactgttttgccagccagtgagctatacggaccatatcatcgccatacaagctgctgatgctaattaaacgcagccaaatttctgtatcgaccatccttatctccctgccataagcagccttagcaatctttgcgattggtcagtgatgctgtcaatcagagggggatttgtctagaatagaagaaataatctttctaactcctgaacacatctctggagatttatgtcagttttgcaagtgttacatattccggacgagcggcttcgcaaagttgctaaaccggtagaagaagtgaatgcagaaattcagcgtatcgtcgatgatatgttcgagacgatgtacgcagaagaaggtattggcctggcggcaacccaggttgatatccatcaacgtatcattgtaattgatgtttcggaaaaccgtgacgaacggctggtgttaatcaatccggagcttttagaaaaaagcggcgaaacaggcattgaagaaggttgcctgtcgatccctgaacaacgtgctttagtgccacgcgcagagaaagttaaaattcgcgccctggaccgcgacggtaaaccatttgaactggaagcagacggtctgttagccatctgtattcagcatgagatggatcacctggtcggcaaactgtttatggattatctgtcaccgctgaaacaacaacgtattcgtcagaaagttgaaaaactggatcgtctgaaagcccgggcttaaggataagaattaacgtgtcagaatcactacgtattatttttgcgggtacacctgactttgcagcgcgtcatctcgacgcgctgttgtcttctggtcataacatcgttggcgtgtttacccagccagaccgaccggcaggacgcggtaaaaaactgatgcccagcccggttaaagttctggctgaggacaaaggtctgcccgtttttcaacctgtttccctgcgtccacaagaaaaccagcaacgggtcgccgatctgcaggctgatgttatggtcgtcgtcgcctatggtttaattctgcctaaagctgtgctggagatgccgcgtcttggctgtatcaacgttcatggttcactgctgccacgctggcgcggtgctgcaccaatccaacgctcactatgggcgggtgatgcagaaactggtgtgaccattatgcaaatggatgttggtttagacaccggtgacatgctttataagctctcctgcccgattactgcagaagataccagtggtacgctgtacgacaaactggcagagcttggcccacaagggcttattactacgttgaaacaactggcagacggcacggcgaaaccagaagttcaggacgaaactcttgtcacttacgccgaaaagttgagtaaagaagaagcgcgtattgactggtcactttcggcagcacagcttgaacgttgcattcgcgctttcaatccatggccaatgagctggctggaaattgaagggcagccggttaaagtctggaaagcatctgtcatcgatacgacaacaaaggctgcgccaggaacaatccttgaagccaataaacaaggcattcaggtcgcgacaggtgatggcatcctgaatctgctctcaatgcaacctgcaggtaagaaagcgatgagcgtgcaagacctcctgaattctcgtcgggaatggtttgtaccgggcaaccgtctggcctgatagtccactcttctaagcccggtcttaccgggcatctttatatttatacttatgaaaaaacaacgtaatttacgtagcatggcggcccaggccattgaacaagtcgttgagcaagggcaatcactgagcaacattctgccaccgctccagcaaaaagtttccgataaagataaagctcttctccaggagttatgctttggcgtactgcgtacgctctcacagtcagactggctgattaataagctaatggcccgtccgatgacaggcaaacagcgtactgttcattacctgattatggttggtttgtatcaactgctttatacccgcattccacctcatgccgcgctggctgaaacggttgaaggcgcagttgcaattaagcgcccgcaacttaagggattgattaacggtgtattacgtcagttccagcgtcagcaagatgagttattagccgagtttaatgccagtgatgcacgttatctgcatccttcctggttgctgaagcgtctgcaaaaggcgtatcccgagcagtggcaatccatcgtcgaagccaataaccagcgtccgccaatgtggctgcgcgttaatcgtacgcatcattcccgcgacagctggcttgcattgctggatgaagcaggaatgaaaggtttcccgcatgcggattaccctgatgctgtacagctggaaacacctgcacctgttcatgcgctacccggttttgaagaaggatgggttaccgttcaggatgcttcagcacaaggttgcatgacctggcttgctccacaaaatggtgaacacattctggatctttgcgccgccccaggcggtaaaacaacgcatattcttgaggttgctccagaggcgcaagttctggcggtcgatattgatgagcagcgcctctctcgcgtttacgacaatttaaaacgccttggtatgaaggcaaccgtaaaacaaggtgatggccgttacccttcccaatggtgtggtgagcaacagttcgatcgcattttattagatgcaccttgttcggcaactggtgtaattcgtcgccatccggatattaaatggttacgccgcgatcgcgatatcccagaactcgcgcagttgcagtctgaaattctcgacgccatctggtcgcatttaaaatccggaggaaccctggtctatgccacctgttcggtgttaccggaagagaatagcctgcagattaaagcctttttgcaacgtaccgctgatgccgaactttgcgaaacaggaacaccagagcaaccgggtaaacaaaatttgcccggtgccgaagagggcgacggcttcttttacgctaagctaatcaaaaagtgatgagataacgggtcgcgactgatgaaaattatcattctgggtgccggccaggttggcggcacactggcggaaaacctggttggcgagaacaacgatattactgttgtcgataccaacggtgagcgtctgcggaccttacaggataaatttgacctgcgagtcgtgcaggggcatggctctcatccacgcgtattgcgggaggcaggtgccgacgacgccgatatgctggttgctgtaaccagttcagatgaaaccaatatggttgcctgccaggtagcctactcacttttcaacacccctaatcgcatcgctcgtatccgctcaccagactacgtgcgcgatgccgataagctatttcattcagatgctgttccgattgatcatctgatcgcaccagagcagttggttatcgataatatttaccgactgattgagtatcccggcgcattgcaggtggtgaacttcgctgagggtaaagtcagcctggctgtggttaaagcctattatggcggcccgctgattggtaatgcactttcgaccatgcgcgaacatatgccacatatcgatactcgtgtggcagcaattttccgccacgatcgccccattcgtccgcaaggttcgaccattgttgaagctggtgatgaagtgttctttattgccgcttcacagcatatccgcgcggtgatgagtgaattacagcgactggaaaaaccgtataagcggatcatgctggttggtggcggtaatatcggtgcagggctggcgcgtcgtctggaaaaagattacagcgttaaactcatcgaacgtaatcagcagcgcgctgccgaactggcggaaaagttgcagaatacgatcgtcttttttggtgatgcgtcggatcaagaactgctggccgaagaacatatcgatcaagttgatctgtttattgccgtcaccaacgatgacgaggccaatatcatgtccgccatgcttgccaaacgtatgggtgcgaaaaaggtgatggtattgatccaacgtcgcgcttatgtggatctggttcaggggagcgtgatcgatattgcgatttcaccacaacaagcaactatttctgcgttgcttagccatgtgcgaaaagcagatattgttggtgtttcctcattacgccgcggcgtagcagaagctattgaagccgttgctcacggtgatgaaagcacctcacgcgttgtcggcagagtcattgacgaaatcaagctaccgccaggaacgattattggagcggtggtacgtggaaacgatgtgatgattgccaatgacaatctgcgcattgagcaaggcgatcacgtaattatgttcctcacagataaaaagtttattaccgacgtcgaaagactcttccagccaagtcctttcttcttgtaattaataaggcgtctaatgacgccttattatttccctttgattattaaggattaattaaatccattcctggcaggaaaatggcttaacatttgttagacttatggttgtcggcttcatagggagaataacatgagcattattaaagaatttcgcgaatttgcgatgcgcgggaacgtggtggatttggcagtgggtgtcattatcggagcggcattcgggaagattgtatcttcactggttgccgatatcatcatgccacctctgggcttattaattggcgggatcgactttaaacagtttgctgtcacgctacgcgaggcccaaggggatatccctgctgttgtgatgcattacggtgtcttcattcaaaacgtctttgattttctgatagtggcctttgccatctttatggcgattaagctaatcaacaaactgaatcggaaaaaagaagaaccagcagcagcaacacctgcaccaactaaagaagaagtattactgacagaaattcgtgatttgctgaaagagcagaataaccgctcttaacaagcgtctgaaagcagaaggccagtggtaaaaaagtgatttactttcttgccactggcctcccagttcccccgattgccatgttttccttttcgcatgtaactgcctttccctttcttatttttctctactcgctgtcggaataagggatcatgtagtaatgcttctatcgcattatcctttatctgccctttagtatgctgatatcggctcataaaaactccagttggttatttaacggcgcgagtgtaatcctgccagtgcaaaaaatcaacagccactcttaacgccactcgccccttgttcaagagcttcaagaatcgagcaataaacactgctatgggcggtcccacaacaggtatcattaaggcgttgcaaggaacgctgcatactctgcaactcggctatacgagcttcgacttcctgcaatctttcctgcacaatgccttttgactcctgacaggtatggtgttcaggatcgatacggatcgacagcaactcgcggatcgactccagactgaaacctagttgtctggcatggcggataaatttcaatcgctggagatcgctttcggtatacaggcgaaacccaccttcggtgcgtacttcatgctccatcatctgctgcttttcgtaataacgaatcgtgtcgggtgttacttccgccatttttgccagctcaccaatgcgatacatacatactccactagttatcgttgattttgttcaacaacttgtcagcataatcgccgcgtaaaaaatcggtactcaatccagcttgtcgcagcttcaattccagtaatgacaatcgacgactaacctcttgatattgcggatcatcatgacggatacctttgagaatatccagaagctgtattgcttccctcctatgctcaagttctggcggtaagcaaccagcattcttcagcaagcgataccccgcacgtaattccggtggcacatgagaatcatcatccagtatcaatggttcgccgctacctaccaggttatcaaactcacctttcgcttgcgcttctgctatatgacgctctgcccactggtcaagtaaccacataaatactccaggggatgaacaaaaagagtacagctattgtagataagtggggatgctacgggtataaaaaaacccgccggggcgggtttttttacgttgcttcagattactctgcagcagcttctgctttctctgaacgatcaaccagctcgatgtaagccatcggcgcattgtcgcctgcacggaagccacacttcagaatacgagtgtaaccaccggcacggctcgcgaaacgcgggcccagttcgttaaacagttttgccacgatctcgttatcacgagtacgggcgaatgccagacgacgattagcaacgctatcagtcttggcaagagtaatcagcggctcaactacgcggcgcagctctttcgctttaggcagagtcgtcttgatgatttcatgacgaaccagtgaacctgccatattgcggaacatagcctggcgatggctgctgttgcggttcagttgacgaccactcttacgatggcgcatgaccttatccttctcagtaaaaccttaacctgtgatccggttactcgtcagcgatgcttgccggtggccagttttccaggcgcatgcccagagacagtccacgggaagccagcacgtctttaatctcagtaagagattttttaccaaggttaggcgttttaaggagctcaacctcggtacgctgtaccagatcaccgatatagtggatagcttctgctttaaggcagttagcagagcggacagtcaattccagatcgtcaacagggcgcagcaggatcggatcgaactctggtttctcttctttcacttcaggctgacgtacatcacgtaagtcaacgaaagcttccagttgttcagccagaatggttgccgcacgacgaatcgcctcttcaggatcgattgtgccgttggtttccatttcgatgaccagcttgtccaggtcggtacgctgttctacacgcgctgcttcaacattgtaggcaatacgctccacagggctgtagcatgcgtcgaccagcagacggccgattgggcgctcatcttcttccgaatgaattcgggtagaagccggcacataaccacgaccgcgctgaactttgatacgcatgctaatagacgcgttctcatcggtcaggtggcagatcacgtgctgcggcttgacgatttcgacatcaccgtcgtgggtgatatcggctgcagtcacagggccaatgccagatttattcaaggtaagaataacttcatctttgccctgaactctcaccgccagccctttcaggttgagcaggatttccaggatatcttcctgaacgccttctttggtgctgtactcatgtagtacaccatcaatctcaacctcggtcaccgcgcaacccggcatcgatgagagcagaatacggcgcagtgcgttacccagagtatggccaaagccacgctctaaaggctcaagggtcaccttggcgtgcgtcgaactcacttgctcgatatcaaccaggcgcggttttagaaactctgtcacagaaccctgcattgtgtcctctctttggtactaagctttacttggagtaaagctcgacgatcaggtgttcgttaatgtccgcagacagatcagaacgctccggcttacgcttaaacgtaccttccatcttgccagcatcaacttccagccaggttggcttttcacgctgctcagccagctccagagcggctttcacgcgagactgcttcttcgctttctcacgaatgcttacaacgtcattcggactaacctgataagaagcgatgttaacaacacgaccgtttaccataattgctttatggctaaccagctgacgtgcttctgcacgagtggcaccgaagcccatacggtatacaacgttgtccagacgaccttccagcagagccaacaggttttcaccggtgttgcctttcagacgtgctgcttctttgtagtagttacggaactgacgctccagcacaccatagatacggcgaactttttgcttttcacgcaactgcacaccatagtcagacagacgcggtttacgcgcaccgtgctggccaggagcttgttcaattttacacttggtatcgatcgcgcgaacgccagacttaaggaataagtcggtgccctcacgacggctcagcttgagcttaggacccaaatatcttgccattttctttctccaacaaacctggaaaacgaggcgttatacgcgacgttttttcggcggacgacaaccgttatgagggatcggagtcacatcagtaatgttagtgatgcggaaacctgcggcgttcagagcacgaatagtagattcgcggcctggacccggacctttaaccataacttccagattcttgatgccgtattctttcacggcgtcagcgcaacgctctgctgcaacctgtgctgcaaacggagtggatttgcgagaaccacggaaaccggaaccaccggctgttgcccaacccaacgcgttaccctgacgatcagtgatagtcacgatggtgttgttgaaagaagcatggatatgagccacgccgtcagagacttgttttcttacacgtttacgtgcacgaattggtgcctttgccattattcaatcaccccgattatttcttgatcggtttgcgcggacccttacgggtacgtgcgttggtcttggtacgctgaccgcgaaccgggagaccacgacgatgacgcaaaccgcgatagcaaccaagatccatcaggcgcttgatgctcatgctgatttcacggcgcagatcaccttcaacgacaaatttggcaacttcgtcacgcagcgtgtcgatttgtccttcagacagctcactgatcttaacatcttcagcgatacccgctgcagccaggatggctttagaacgggtcttgccgacgccataaatcgaagttaatgcgattacggcatgcttatgatcaggaatgttaatgcctgctatacgggccactatgcactcctactatttaatatgtacgttccatgctgaaaagcccgttttcaggatactcaaatggaaacgcacagacatacaaaagattggctggctaatctagccagctcaacccaactttgcaagaaaaatatgcgaaaaaatcagccttggcgctgtttatgcttcggctcggcactgcaaatcacacggatgacaccatcacgcttaacgattttgcagttacggcataatttcttgacggaagcacgaactttcatttttactctccgtaacttctcgggcgaccaattatcggccgtagcctttcaggttcgccttcttcaatgcagactcatactgactggacatcatcagagtttgcacttgagccataaagtccataatcacgacaacaacgataagcagtgaggtcccaccgaagtagaacggtactttcattgcatcacgcatgaactccgggatcaggcagataaaggtaatgtacagcgcaccaaccaaggtcaggcgggtcattactttatcgatatacttcgccgtttgctctcccggacgaattcctggtacaaatgcaccggacttcttcaggttatctgctgtttcacgcgggttgaaaaccaacgccgtgtagaagaaacagaagaagatgattgcagacgcatagagtaacacataaagcggttgcccaggctgcaaatacagcgaaattgttgtcagccagttccaaccagtaccgcccccgaaccatgacgcgatggtcgccgggaacagaataatactggaagcgaagattgccgggattacccccgccatattcactttcagcggtaaatgtgtgctctgtgcagcatagacacgacgaccttgctgacgtttcgcgtagtttaccacaatgcggcgttgaccacgctcaacaaatacaacaaagaacgtcactgcaaatactaatactgcaaccaacagcaacacgaggaagtgcaggtcgccttgacgcgcttgctcgatagtatgggcaatggctggcgggagtcccgcgacaataccggcgaagataatgattgaaataccgttgccgatacctcgttcagtgatctgttcgcccaaccacatcaggaacatggttcctgtgaccagacttacaacagcggtgaagtagaatgcaaagcccgggttaatcaccaggccttgcataccaggcatattcggcagaccagtagcaataccgatcgactggaatattgccagcaccagagtaccgtagcgggtgtactggctgatcttacgacgaccagactccccttctttcttaatttctgccaacgttggatgaaccaccgtcagtagctggataatgatcgacgccgaaatatacggcatgatccccagagcaaagatagaagcacggctgagagcaccaccagagaacatgttaaacatctcaatgatggtgcctcgctgttgctcaagcagtttggcaagtacagcggcatcaataccagggatcggaataaaagagccaatacggaacacaatcagcgcaccgataacaaacagcagtctgcgtttcagctcgcctaagccacctttggcactttgaaaatctaatcccggttgtttagccatctgctacttattcctcgattttaccgccagcagcttcgatagcagcacgagcgcctttagtaacacgcaggccacgaacagttaccggagtcgttacttcgccagccaggatcactttcgcgaactcgatctggataccgataatgttagccgctttcagcgtgttcaggtctacaacaccgccttctactttagccaggtcagacagacgaacttcggctgtaatcgctgctttacgagaagtgaagccgaatttcggcagacgacggtacagaggcatctgaccaccctcgaaaccgcgacgtacgccaccgccagaacgagatttctgacctttgtgaccacgaccaccggttttaccgaggccagaaccgataccacgacccaggcgtttacccgcctttttggagccttcggccggagacagagtatttaaacgcatctcttactcctcaactttaaccatgaaggaaaccgcgttgatcataccgcgaatagcaggagtatcctcgcgctctacggtgtgaccaatacgacgcagacccaggccaagcagcgttgccttgtgtttcggcagacgaccgattgcactgcgggtttgagtaattttaatagtctttgccatggtttatttccccagaatttcttcaacggatttaccacgcttggcagcgaccatttctggagaattcatattttccaggccatcgatagttgcacgaaccacgttaatcgggttggtggaaccatacgctttagccagaacgttatgaaccccagcgacttccagaacggcgcgcattgcaccaccggcgatgataccggtaccttcggaagccggctgcatgaatacgcgagaacccgtatgaacacctttaacagggtgttgcagagtgccgttattcagcgcgacgttaatcatattgcgacgggctttttccatcgctttctggatcgctgctggaacttcacgcgctttaccgtaaccaaaaccaacgcgaccgttaccatcgccaactacagtcagagctgtgaaggagaaaatacgaccacctttaacggttttagatacgcggtttaccgcgatcagcttttcctgcagttcgccagcttgtttttcgatgtgagccatcttacacctctaccttagaactgaaggccagcttcacgggcagcatctgccagtgcctggacacgaccatgatattggaacccggaacggtcaaaggatacatctttgatgcctttttccagagcgcgttcagcgacagctttacccacagctgcagccgcgtctttgttaccggtgtacttcagttgttcagcgatagctttttctacagtagaagcagctaccagaacttcagaaccgttcggtgcaattacctgtgcgtaaatgtgacgcggggtacgatgtaccaccaggcgagttgcgcccagctcctggagcttgcggcgtgcgcgggtcgcacgacggatacgagcagatttcttatccatagtgttaccttacttcttcttagcctctttggtacgcacgacttcgtcggcgtaacgaacacccttgcctttgtaaggctcaggacgacggtaggcgcgcagatccgctgcaacctggccgatcacctgcttatcagcgcctttcagcacgatttcagtctgagtcggacattcagcagtgatacccgcaggcagctgatggtcaacaggatgagagaaacccagagacaggttaatcacattgcctttaaccgctgcacggtaacctacaccaaccagctgcagcttcttagtgaagccttcggtaacaccgataaccattgagttcagcagggcacgcgcggtaccagcctgtgcccaaccgtctgcgtaaccatcacgcggaccgaaggtcagggtattatctgcatgtttaacttcaacagcatcgttgagagtacgagtcagctcgccgtttttacctttgatcgtaataacctgaccgttgatttttacgtcaacgccggcaggaacaacgaccggtgctttagcaacacgagacattttttcctccgattaggctacgtagcagataatttcgccaccaagaccagcctggcgcgctgcacgatcagtcataacacctttagaggtagaaacaactgcgatacccagacccgccataactttcggcagctcatctttacgtttatagatgcgcagacctgggcggctgacacgctgaatgctttctacaacagctttgccctggaaatacttcagagtaagttccagttcaggcttggtgtcgccttcaactttaaaatcttcaataaaaccttcttccttcagcacgttggcgattgccactttcagcttggaggaaggcatggtgaccgcagctttgttcgcggcctgaccgttacggatacgggtcagcatatccgcgatcggatcttgcatgctcatctgtctttactcccgtgattcaattggtgacaattaccagctagcctttttcagacccgggatttcaccgcgcatagcggcttcacggaccttaatacggctcaacccgaacttccgcaggaaaccatgcggacgacctgtttgacggcagcggttacgctgacgagacgggctggaatcacgcggcagagtctgcagcttgagaacagcgttccaacgatcttcgtcggaagcgttcacatcagagatgatcgctttcagttcagcgcgtttcgcgaagtatttatcagctaaagctacgcgttttacttcgcgtgctttcattgattgcttagccatttagtaaccctaccttacttgcggaacgggaagtcaaaggcagccagcagagcgcggccttcttcgtcagatttcgcagtagtggtaatggtaatatccaaaccacgaacgcggtcgactttatcgtagtcgatttctgggaagatgatctgctcacggacacccatgctgtagttaccacgaccgtcgaaagacttagcggacaggccacggaagtcacggatacgaggtacagcaatagtgatcaggcgctcaaagaactcccacatgcgttcgccacgcagagttactttacagccgatcggatagccctgacggattttgaagcctgcaacagatttgcgtgctttggtgatcagcggtttttgaccggaaattgctgccaggtctgctgctgcgttatccagcagttttttgtcagcgatcgcttcaccaacacccatgttcagggtgatcttctcgacccgagggacttgcatgacagaattgtagttaaactcagtcatgagttttttaactacttcgtctttgtagtaatcatgcagtttcgccatcgtactactccaaattacttgatagtttcgctgttagacttgaagaaacggacttttttaccgtcttcgaatctaaagcctacacggtcagccttgccggttgtcgcattgaagattgctacgttggaaacctgaatagcggcttctttttcaacgatgccacccggttggttcagggccggaaccggcttctgatgtttcttaaccaggttgataccttcaacaatgaccttgccggaagacaggacattcttaactttaccgcgtttacctttatctttaccggttaacacgataacttcgtcatcacgacggattttcgctgccatgattcgctccttagagtacttctggtgccagagagataattttcatgaacttctcactacgaagctcacgagttaccggcccaaaaatacgcgtaccgataggctgctcgctgttgttgttcagaagaacacaagcattaccatcgaagcgaatgacagaaccgtccgggcgacgaacacccttcttggtgcgcaccactaccgccttcagcacatcaccttttttgaccttaccacgcggaattgcttctttgatggtgatcttgatgatgtcgcctacgcctgcgtagcgacggtgcgagccacccagaaccttgatacacattacgcgacgtgcaccggagttgtcggcgacgttcagcatagtctgttcttggatcattttagtgctccgctaatgtcaactactactgagacccgaaaatcaggtcgttaaaaatccccatatcgagggcgcggcattataacaccgcttcaaggatatgggtagaaaaaataaacggctcatttctgagccgtttattcgtatcgagagagtgtactgtattacagaaccgctttctctacaacgcgaaccagcgtccaggatttagtcttggacagcggacggcattcgcggatttcaaccacgtcaccgataccgcattcgttgttctcgtcatgtacgtgcagtttggtcgtacgcttgatgaatttaccgtagatcgggtgtttcacaaaacgttcgatagcaacaacaatggatttctccattttgtcgctaacaacgcgaccttgcagagtacggattttatcggtcattacgcacccgccttctcgttcagtaaagtcttaacgcgtgcgacatcgcgacgcacttgcttcaacaggtgagactgttgcagctggccacttgcagcctgcatacgcaggttgaactgctcacgcagcaggttcagcagctcggtgttcagctcttcaacgctcttctcacgcagctcttttgctttcattacatcaccgtcttagttacaaaggtggttttaatcggcagtttcgctgctgccagcttgaatgcttcacgggccagctcttccggaacaccgtccatttcatacaggactttacccggctgaatcaaggcaacccaatactccacgttacctttacctttacccatacgcactgccagcggcttttcagtgatcggtttgtccgggaacacacggatccagatcttaccttgacgcttaactgcacgggtcatagcacgacgtgctgcttcgatctgacgtgcagtcagacgaccacggccaacagctttcagaccgaagctgccgaagctaacatccgtaccctgcgccagaccgcggttacggcctttgtgcattttacggaattttgtacgctttggttgtaacatcagcgacgctccttatttacggcctttacgctgctgctttttaggctgagcagccggtttttccggttgttcaacagcagccataccacccaggatctcgcctttgaagatccacactttaacgccgattacaccgtaagtggtgtgcgcttcagaggtgttgtagtcgatgtcagcacgcagagtgtgcagcggtacgcgaccttcgcggtaccattcggtacgtgcgatttccgcgccgcccagacggccgctaacttcaactttaatacctttagcgcccagacgcattgcgttctgtacagcacgcttcatagcacgacggaacataacgcgacgttccagctgagaagtgatgctgtcagcaaccagttttgcgtccagttcaggcttacgaacttcggcgatgttgatctgtgcaggaacgccagcgatgtccgctacgaccttacgcagtttttctacgtcttcaccttttttaccgataacgatacccgggcgagcagtgtgaatggttacacggatgctcttagccggacgctcgataacgatacgagatacggacgctttagccagttccttagtcaggtactgacgtactttaaaatcgctgtccaggttgtcagcgaattctttggtgttcgcaaaccaggtagagttccatggttttacaatacccaggcgaataccattaggatgtactttctgacccattgctagtctccagagtctcagcgatcggacacaaccacagtgatgtggctggtgcgcttcaggatgcgatctgcacgaccttttgcacgcggcataatgcgcttcatgctcgggccttcgtctacgaaaattttcgtaactttcagatcgtcaatgtcagcgccatcgttgtgttcagcgttagcaatggcagattccagaactttcttgaccagtacagccgctttcttgttggtgtaggtcaaaatatccagagcctgcgacactttcttaccgcgaatcaggtcagcaacaaggcgaaccttctgagcagaagaacgagcatggcgatgtttagcgatagtttccatctcttcctcctaccttatttcttcttcgcttttttatcagcagcgtggccgcgataagtacgagtcggtgcgaattcacccagtttgtgaccgaccatttcgtcggttacaaataccggaacgtgctgacgaccattatggacagcgatggtcaaaccgatcatgttaggaaagatcgttgaacgacgggaccaagtgcgcaggggcttcttgtctccgctttccaccgctttctctaccttcttcagcaagtgcaggtcaataaaaggacctttcttgagagaacgtggcatggcttatcctctaaaattatttgctacggcgacgtacgatgaatttatcagtacgcttgttgctgcgggtcttcttacctttggtctgaacgccccacggagttaccgggtgcttaccaaagttacgaccttcaccaccaccatgtgggtggtctaccgggttcatcgcggtaccgcgaacggtcggacgaacaccacgccagcgtgcagcacctgctttacccagaacgcgcagcatatgctcagcattgccaacttcgcccagagttgcacggcagtctgcttctactttacgcatttcaccagaacgcagacgcagggtgacataagcaccatcacgagcaacgatctgaacgtaagtaccagcggaacgtgccagctgaccgcctttacctggtttcatttctacgttatgaacagtagaaccaaccgggatgttgcgcatcggcagggtgttacctggtttgattgcagcatcaacgccagactgaatctggtcgccagctttcaggcctttaggggccaggatgtaacggcgttcaccgtctttgtacagaaccagcgcgatgttcgcggaacggttcggatcgtactcaagacgttcaacaactgccgggataccgtctttgttgcgtttgaagtcaacaatacggtaagcctgcttgtggccaccaccgatatgacgagtggtgatacggccattgttgttacgaccaccggatttgctgtttttttccagcaacggagcaaaaggtttgcccttgtgcagctcagggttaaccactttaactacgtggcgacgacccggagatgtcggtttacatttaacaactgccattgtattactcctccgacttactcagcgccgccaacgaagtccagattctggccttctttcagggtgacgtaagcttttttccagtcgctacgacgaccgatacgctgtccgtgacgtttaactttccctttaactaccagggtgttaacgacttcgacttcgacttcaaacagtttctgcacagcagctttgatttctgctttggtcgcgtctttagcaactttgagtacgatggtgttggatttttccatcgcagtagacgctttttcagaaacgtgcggtgcacgcagcaccttcagcagacgttcttcacgaatcatgccagcatctcctcaacttgcttaacagcatcagcagtcattacgactttgtcgaaggcgatcaggctaaccgggtcgataccagttgcatcgcgtacgtcaaccttgtgcaggttgcgcgcagccaggaacaggttctcgtccagctcaccggtgatgatcagcacatcttccagagccatgtctttcagtttctgtgccagcagcttagttttcggcgcttctacagagaacttctcgacaacgatcagacgatcctgacgtaccagttcggacaggatgcttttcagcgcgccgcggtacatcttcttgttaactttttgactgtggtcctgcggacgagcagcaaaggtcacgccaccagaacgccagatcgggctcttgatagaaccagaacgcgcacggccggtgcctttctggcgccacggttttttaccggaaccagttacttcagcacgagtcttctgagcacgagtaccctgacgagcaccagctgcataagcaacaacaacctggtgaaccagcgcttcgttgaaatcacgaccgaaggtagtttcggaaacagtcagcgcgctctgcgcgtctttcaatactaattccattgctatctccttacgccttcacagctggtttaacgatcaggtcgctaccggttgcacccgggacagcgcctttaaccagcagcaggttgcgctcagcgtcaacgcgtactacgtcaaggctctgaacggttacacgttcgttacccatctgacctgccattttcttgcctttgaacactttgcccggagtctggttctgaccgatagaacccggaacgcggtgagacaaggagttaccgtgagtagcgtcctgggtacggaagttccagcgcttaacggtacctgcgaaacctttacctttagaggtgccagttacgtcaacttttttaacgtcagcaaacagttcaacgctaatgctctgacctacagtgaactcttcgccttcagccaggcggaattcccacagaccacggccagcttctacgccagctttagcgaagtgtccagcttcaggcttggtcacacggttagcttttttagcaccggtggtcacctgaatagcacggtagccatcgttagccaggtctttaacctgagtaacgcggtttgcttcaacttcgattacggttactgggatagaaacgccgtcttctgtgaagatacgggtcatacccacttttttaccgactaaaccaatcattgtttcaacctctcaatcgctcaatgacctgattaacccaggctgatctgcacgtctacaccggcagccagatccagacgcatcagagcatcaacggttttctcggttggctcaacgatgtcaaccagacgcaagtgagtacggatttcgtactgatcgcgcgcgtctttgttgacgtgcggggagatcagaacagtgaagcgctctttgcgtgtcggcagcgggatcggaccacggacctgcgcaccagtgcgcttggcagtctcgacgatttccgcggttgcttgatcgatcagacgatgatcaaacgctttcaggcggatacggattctttggttctgcatgagaccagagctccaattattttataaacgaaaatgattactcctcagacccattacgattgatgggagagtgtaaccgttcttacgtagctccccgattgggagcattgttaggtagccaaattcggctaactgaggttcagattgaacctgctgtcaactacgacaagcccgcgcattatacatacttaaccaccgaacgcaagcgtattgctagtaaagtaaacagctttcgggttatctctcaagttcgttcagcgcatttttgacacgctctcttaaaccggctttctcgtcgctttcttctacagtattttcttcgtcttcagaagaagaggtggcattctcaaccgcgacgcctgggtcatcttcctcctcgacggattcgacgacggggagtggctgttttttgaaaaaatagtgttgtgttgattgtttaaaagcaggcgtttcagcatctactactgtgacttctgcttttactatccaaagcgcccatagctgcctggcatacccaccaaccaataccattcctgcaaaccacaggcaaatcagcaataaacaaatgacatatattatggtgctgtgtttttgtcgggagaagataccagggtgacccgtttctttctgctcacgcgcggcgatatagaattcaaacatgtcatttccccttcactgttgtttctggggaaatatttgcttcatcccgatataagtaggcactctcccccgccacctgccagagatgtactaacgttgaaaagccaacaacaccgtcagttttcaagtgatggcttttttgaaattgctttattttttctaccaacaagggacgccactctgccgaagattctgtcgaaatatgcaatgcgcggtttaacatcgtttccagccagagaatctcttcctcgctgctatcatgcgtaatggtactctccccttccggcgacattttccacaacagaagataatcacccgtccataccaactcaaaccatttatgtgtcagcgtccaggtttgctgccctacgagtacatcaacggtagcatcaccgacgcgaacgaccacaacaggcaattttttgtccccgactttaagcgatgcgatccagggcaaattctgatccaccaatgtttgtaaagaagcattcccacttttacataccagccccgctcttactgcctgatcgcaccaggccgaatcggctgggacctcgtacccccatacgccgtataacacgcttagcgcctcactatcgcgcatcaccacatgggcaatatccttagtcatatcttgtttagctactggcgttacgggtatcagccacgcaggaacgggtaacggagctgtgaaagaggacagcagtagccaaccacaggtaagtgcgataatggttccactcatcaccacggcaagctgcattttccgggggcggttatcacctaatacgcggtaaatcattcgccattgttttgcagtgaaaacgcgggtctgctcggcttgctgtaataagctaattgtttcgccggcaagcgccagctttctgcgatctccccgacataataaagctatccgtttcagaactctggcggttaaaaggagatcgggctggtcaatattctgaccttcaaggatgcttgccttaagctcgtgctccgtcagacgacctgtcgagacaagttcaatgccctgttttttaaaatcacgttcaacttttcgatcgggtctgccgatcagcaaaaattgaccgtcaggaataagagatatcgcgcgttggagatcatcaagtatgcggcggtgattcaggtgagcattttcaataataataagagggcagcgactatcagttcgatgaagtgcatgcagtaattgacccgccatctcatctcgcgtccaggcgctgtcacggcagccctgttcagccgcattatcgtcggtaacgatccatgcggccttaccttgccaggaaacaacgaggcttaaagtaatcacacggcgatgtttatctttttgtagttgctgcgccagccaggtttttccacttccagcctcacccaacaaatagcacagacgccaggtctgacgtttctcacgcaaccaggaaagaatgacttctcttctcgtagacatagaacttcctgttttaattattgattatccttaatcataaaaataatgtatgtatttattaattaaatacatattactaatataaataaattttgcttgattcatgcaagcggcattaatactatttatactaacgtcaatatacaacccacccaatctattttattagaacatacatcgtgcccacactacctttccctttccatctggcgaatcataataaagatgctgccatcaatatattgattatatttataagcatagggttgattatttttaatgtgaattatttccatacaactatagttaaaaatgaacagatcattaatcaaccaacaaatgcatttcagtctgaattcagccttgccgctttatggcgcaacgaaaatcatgctggggtaaaagatgcaaatcccgtggcagttaatcaggaaacacctaagctctctatagcgcttaatggcattgtactcacatcgaatgatgagacttcttttgtcttaattaatgaggggaacgaacaaaagcgatactccctcaacgaagcccttgagtcagcgccgggaacgtttattagaaaaataaataaaaccagcgttgtgtttgaaactcacgggcattacgaaaaagtaactctccatccagggctacctgacatcatcaagcagcctgattcggaaaatcaaaatgtactcgccgattatattatcgccacacctatacgtgatggagaacagatatacggtcttcgattgaatcctcgtaagggtctcaatgcatttaccaccagcttgctgcaacctggggatatcgccctcaggatcaataatctttcgctgacccaccctgatgaggtttcacaggcattaagtttactgctaactcaacaaagtgctcagtttacaattcgtcgcaacggcgtaccccgcttgataaatgtttccgtcgcggaacttacaggaatgaatggacagcgcaatgaagggactcaataaaatcacctgctgcttgctggcagcactacttatgccttgtgcagggcacgctgagaacgaacaatacggcgctaacttcaataacgccgatatccgccagttcgtggaaatagtgggtcagcatcttggcaaaacgatcctgatcgacccttcggtacagggaaccatttccgtacgcagtaatgatacgtttagccaacaggagtactaccagttctttttaagtattcttgatctttacggttattccgtgatcacgctggacaatggttttctgaaagtggtgcgctcagctaatgtaaaaacatcgccagggatgattgctgacagttctcgtccaggcgtaggtgatgagttggtcacccgaatcgtaccgcttgagaacgttcctgctcgtgacctggctcccctgctccgccagatgatggatgcgggtagcgtcggtaatgttgtgcattatgaaccctccaacgttcttattctgaccggtcgtgcctccaccattaataaactgattgaagtcataaagcgcgttgatgtcatcggcacagagaagcagcaaattattcatctggaatatgcatcagcggaagatctcgccgagattcttaatcaattaatcagcgaaagccacggtaaaagccagatgcctgccctcctttccgcgaagattgtggcggataagcgaaccaactctcttatcatcagcgggccggaaaaagcacgccagcgcataacttcattactgaaaagccttgatgtcgaagagagcgaggaaggaaatacccgggtctattacctgaaatatgctaaagccacgaatctggtggaagtgctaaccggtgtttccgaaaagctgaaagatgaaaaagggaattcgcgtaagccttcttctacttctgcgatggataatgtggccattaccgccgatgaacagaccaactcgttggtcattaccgctgaccagtccgtccaggagaaactcgccacggtaattgcgcgtctggatattcgccgtgcacaggtgctggttgaggcaatcatcgtcgaagttcaggatggaaatggactcaacctcggcgtgcaatgggcgaataaaaacgttggcgcacagcaatttaccaatacgggattaccggtttttaacgctgcgcaaggtgtagctgattataaaaagaatggcgggatcaccagcgcgaatcctgcctgggatatgtttagcgcctacaatggcatggctgcaggcttcttcaatggcgactggggcgtattgttgactgcgctggccagtaacaataaaaatgacatcctcgccaccccgagcatcgtaacgctggataataaactcgcgtccttcaacgttggtcaggatgtgccggtgctatccggctctcagaccacttctggggataacgtctttaatactgtcgaacgcaaaacggtgggcacaaaactcaaagtcactccgcaggtcaatgaaggcgacgcggtactgctcgaaatagagcaggaggtttccagcgttgactcttcgtctaattcgacgctcggcccgacatttaacacccgtactattcaaaacgccgtgctggttaaaaccggtgaaacggtggtcctgggcggattgctggatgatttttctaaagagcaagtgtcaaaggttcctctgcttggcgatattcctttagtgggacaactcttccgctatacctcgaccgagcgcgctaaacgcaacctgatggtatttatccgtccgacgattatccgtgacgatgatgtttatcgctcactgtcaaaagagaaatacacccgctaccgccaggagcaacagctgcgaatcgacgggaaatcaaaagcgctgattggctcggaagatttgccggtgctggatgagaacacgttcaacagtcacgctcctgcgccatcgtcacggtgaggcattcttatgagaattcactcaccgtaccccgccagttgggcgctggcacaacgaattggttatctctattcagagggcgagattatttatctcgccgatacgccattcgaacggttactcgatattcaacgtcaggttggccagtgccagaccatgaccagcttgtcacaggctgattttgaagcccggctggaagcggtgttccatcagaataccggtgagtcgcaacagattgcgcaggatatcgatcaatccgtcgatcttctctcgctttcggaagagatgcccgcaaatgaagatctgctgaatgaagattcagccgcaccggttatccgcttgatcaatgctattttgagtgaggccatcaaagaaaccgcctccgatatccacattgaaacctatgaaaaaacaatgtcgatccgttttcgcatcgacggcgttttgcggacaattttacagcccaacaaaaaactggcggcactgcttatctcccgaattaaggtcatggcgcgtcttgatatcgccgaaaaacgtattccacaggatggaagaatcagtttgcgtatcgggcgacgtaacatagatgtccgcgtatccacactgccatccatctatggtgaacgcactgtgctccgcctgctggataaaaacagcctccagctttcattgaacaacctggggatgacggcagcggataaacaggatttagaaaatctcattcagcttccgcacggtattatcctggtaacagggccgacaggctccggtaaaagcaccacgctctacgccattctttcggcgcttaatacccctggccgtaatattctgacggtagaagatcccgtggaatatgaactggaaggcataggacaaacgcaggtgaatacccgcgtggatatgtctttcgctcgcggcctgcgcgccatacttcgccaggacccggatgtcgtcatggtgggggaaattcgtgatacagaaaccgcgcaaattgcggttcaggcctcgctcacaggccatctggtactctcaacactccacactaacagtgcatcaggcgcagtcacccggctacgcgacatgggcgtcgaatcattcctgctttcgtcttcactggcagggattatcgcgcaacgtctggttcgtcgtctgtgtccgcaatgccgacaattcacgcccgtatcgccgcaacaatcgcagatgtttaaatatcatcagctcgcggtgacaacaattggcactcccgtaggttgccctcattgccatcaatccggttatcaggggcgcatggcgatccacgaaatgatggtggtgacgccggaattgcgggccgctattcatgaaaatgtggatgaacaagcactggagcgactggtccggcaacaacacaatgccttaatcaaaaatggcctgcaaaaagtgatacgcggtgacacctcctgggatgaggttatgcgcgtcgccagtgccacgctggagaacgaagcatgaattatcgctatcgcgccatgacccaggatggtcaaaaattgcaggggatcattgatgctaacgatgaacgtcaggcacgactgcggctgcgtgaagaagggcttttcctgctggatattcgcccccaaaaaagttcgggagtaaaaacacgtcgcccgaggatcagccatagtgaactgacgcttttcacccggcagttggcaaccttaagcgcagcggcattacccctggaagagagccttgccgtaattggtcaacaaagcagtaataatcgactggctgacgtgttaaatcaggtacgcagcgccatccttgaagggcatcccctttccgatgcgttacaacattttcccacgcttttcgattcgctctaccgtaccctggtaaaagcgggcgaaaagagcggtctgctggccccggtgttggaaaagctggctgattacaatgaaaaccggcagaaaatccgcagcaagctcattcagtcactgatctacccctgcatgctcactacggtggcgattgtggtcgtgattattctcctcactgctgtcgtgcccaaaattaccgaacagttcgtgcatatgaagcagcaactgccactgagtacacgcattcttttaggtctgagcgacacgttgcaacgtaccggcccgacattattagcgacggtgtttattgtcgctgtgggtttctggctctggttaaaacgcggcaataaccgccaccgttttcatgccatgttactgcgcgttgcgctcatcggcccgctgatttgcgccattaacagcgcacgctatctccgcactttaagtattttgcaatccagcggcgtccctctgctggatgggatgaatttgtccaccgaaagcctcaacaacctcgaaattcgccagcgcctggcaaatgcggcagaaaacgttcgccagggtaacagcattcatctttcactggaacaaaccgcaattttcccgccgatgatgctctacatggtggcctctggcgaaaaaagcgggcaactcggcacgttaatggtcagagccgcagataaccaggagacactccaacaaaatcggatcgccttaacgctctccatcttcgagccagcactcattattacgatggcactgatcgtcctgtttattgtcgtgtcggtactccaacctcttcttcaacttaactcaatgattaattaaggaaagtatatgcgcgcaacggataagcaacgcggttttacattactggaaattatggtggttattgtcatcattggcgtacttgccagcctggtggttcccaacctgatgggcaataaagaaaaggcggataagcaaaaagccgtcagcgatatcgtggcactggaaaacgccctggatatgtacaaactcgacaatcatcgctatccaaccacaaatcaggggcttgaatccttagtcgaagcgccgacactgccaccgctggccgcaaactataacaaggaaggttatatcaagcgtctgcctgccgatccctggggcaatgattatgtcctcgttaatcctggtgaacatggtgcatacgatctgctttcagcagggcccgatggtgaaatgggaaccgaggacgacatcaccaactggggtttgagcaagaagaaaaagtaagtcagcgatgaatcagcaacgcgggtttaccctgctggagatgatgctggtgctggcgctggtcgctatcacggcaagtgtggtgctcttcacatatggtcgggaggatgccgccaacactcgtgcgcgcgaaacagcggcgcggtttaccgctgcacttgaattagccatcgaccgcgccacgctcagtggtcagcctgtcggtatccatttctctgattcagcatggcgcattatggtaccgggcaaaacaccatcagcctggcgctgggttccattacaagaagatgccgcagacgagagcaaaaatgactggggtgaagaactctcaattcaacttcagccatttaaacctgatgacagcaaccaaccgcaggtggtgattctggccgacggacaaatcacgcccttctctttgttgatggctaataccgggaccggtgagccgctcctgacgttagtcagttcaggctcatggcccctggatcaaacgctcgccagagatacccgcccatgaacaaacaatcagggatgacactgcttgaagtcttactggcgatgagtattttcaccgctgttgctctgactttaatgagcagtatgcaagggcaacgaaatgccatcgagcgaatgcgcaacgagacgctggcattgtggatagcggataaccagcttcagtcacaagattcattcggcgaggaaaacacgtccagttctggcaaagagttaataaatggcgaagagtggaactggcgcagcgatatccactcaagcaaagacggcacgcttctggaacacaccataacggtgacattacccagcggtcagacaacctcgcttacgcgctatcaaagcatcaataataaatccgggcaggcacaagatgattaatcgccagcagggtttcacattgctggaagtcatggcggcgctggcgattttctcaatgcttagcgtgctggcgtttatgattttttctcaagtttccgagttgcatcaacgttcacagaaagaaatccagaagttcaatcagctacagcgcaccatcaccattcttgataacgatctcctgcaactggtcgcccggcggaatcggagtacggacaaaatcatggtgttgggtgaagaagcgatttttaccacgcaaagtcgcgatccgctggcccctctcagtgaagcacaaaccttactcactgttcactggtatctgcgaaatcatacgctctaccgtgctgttcgtacttctgtggatggcaggaaggatcaccccgcccaggcgatgctggaacatgtcgagagctttcttctggaaagtaacagcggagaaagccaggagcttcctctctcagtcacgttacatctgaagactcagcaatatggggcgttacagcgccgttttgcattacctgagcagttagcgagagaagagtcgccagctcagacgcaggccgggaataataaccatgaataatgaacaacgcggcgtagcactgctcattgtactcatgttactggcgctcatggctgctctggctgcagacatgacgatcagttttcacggccagcttcatcgaacccgccaggtaaaccatcatttgcaacggcaatatgatattgagctggcggagaaacttgcgcttgccagcctcacccaggacgttaaagataacgacagacaaaccacgttgcagcagtactgggcacaaccgcaacagttgcagctggaaaatggcaatacagtgaagtggcagttacgcgatgcccagcactgttttaatctcaatgccttagcaaaaatctctgacgccccgctggcttcccctgatttccccgtccaggtattcagtgccctgctgattaacgccggtatcgatcgcggaaacaccgatgagatcgtgcaatcaatcgctgactatattgatgccgatgattcgccacgctttcacggcgcagaagataacttttaccaaagccaaacgccgcctcgccatagcgccaatcaaatgctttttctgaccggtgaattgcgtcagataaaaggcataaccgaaaacatctatcagcggcttatcccgtatgtctgcgttctcccgacctcggaacttagcatcaatcttaatatgctaacggagaacgatattccgctcttcagagcattattcctcaataacatcacggatgctgacgctcgggtcttattacaaaaaaggcccagggaaggctggctcaccacagatgcatttctttactgggcgcagcaggatttctccggcgtgaagcccctggttgctcaggtgaaagggcatctctttccctatagccgctattttacgctgaatacggaaagtatcagcgacgaacaatcctagggatggcaaagccatatttttttcaaccgtaaacagcagagcgcccaaatctatcggcgtacgctgcaactctactaatcataaggatcgtgatgcctgaatcgttgatggtaatacgttctttctcgacgctgcgtaagcattgggaatggatgacgttctccgcagatagcgtatcttcggtacatacgctcacagacgatcttccgctggagtcgctggccgatcagcccggtgctggaaatgttcaccttttgatcccacctgagggtcttttatatcgttccctcacgctgcccaacgccaaatacaaactcaccgcgcaaacattacagtggttggcggaggagacattacccgacgccagccaaaattggcactggacggttgtcgataaacaaaacgaaagtgtcgaggtgataggcattcagtcggagaaactcagtcgttatcttgagcgtttacatactgccggactcaacgtgacgcgggttttgccagatggctgctatcttccctgggaagtagatagctggactctggttaaccagcaaacaagctggcttattcgcagtgccgcacatgccttcaacgaactggatgaacactggttacagcatcttgctaaccagtttccgcctgagaatatgcgttgttatggtgtagcgcctcacggcgttgcagcggccaatccacttatccagcatcctgaaataccatcactgagtttgtattctgccgatattgcattccagcgctatgacatgctgcatggtgtttttcgtaaacagaaaactgtaagcaaatcgggaaaatggctcgcccgcctggcagtaagctgtctcgttctctccattctttcttttgttggcagccggggcatcgcgttctggcaaacgcttaagattgaagataaacttcagcaacaacagcaagaaacctggcaacgttatttcccgcagatcaaacacacccacaactttcgtttttactttaagcagcaactcgctcagcaatatcctgaagctgtaccgttgctctatcatttacaaacacttctgcttgaacaccatgaactgcagttaatggaggcgaactatagccagaggcaaaagtcgctgaccttaaaaatgagtgctaagagtgaagccaatatcgatcgtttctgtgagttaacacagtcctggcttccgatggaaaaaacagaaaaagatccggtcagtggcgtatggacagtaaggaactcagggaaatgattaaatcatggtgggcagaaaaatccacatcggaaaaacagatcgttgcggcattggcggttctctcgctcggcgttttttgttggcttgcggtgataaaaccgatagatacctacattgaagagcatcagtcccacgcgcaaaaaattaagaaggacatcaaatggatgcaggatcaagcgagcacccatggtttactcggtcatccagcgcttacgcagcccatcaaaaatatccttctcgaagaagcaaaacgtgagaatttgactatcacgctggaaaacggtccggacaatactctgacaattaaccctgtcacagctcccctcgaaaacgtctcccgctggctcactacggcacagataacatacggtattgttattgaagaccttcagtttactcttgccggaaacgaagagatcaccctcaagcatttgtccttcagggagcaacaataatgacaatgctactgccgctcttcattctggttggttttattgcaggttattttgttaatgtcatggcctatcacctctcgcctttggaggataaaacggcgttaacgtttcgccaggtattggttcatttctggcaaaaaaaatatgcctggcatgatacagtgcccctgatactttgcgttgctgctgctatcgcctgcgccctggcacctttcacgcccattgtgactggcgcactctttctctatttctgtttcgcactcacgctcagtgttattgattttcgcactcagctcctgcccgacaaactcaccttaccgctgctctggcttggcttggtatttaatgcgcagtctggattaattgatttacatgatgcggtttatggcgcggtcgctggctatggggtgctgtggtgtgtttactggggcgtctggttagtttgtcacaaagagggattgggctacggtgatttcaagctactggccgctgcaggcgcgtggtgtggctggcaaacgttaccaatgatactgctgattgcctcgctgggtggcattggttacgccatcgtttcacaacttctgcaacgccggactatacccactatcgcattcggcccgtggcttgcgctcggcagcatgataaacctgggatatctggcctggatctcttattaaccgggagggttctccctcccgacacggctcaaccttcttcgcgaatctgtgcttgcagataattttgcagtcccatcttctgaatcagatcaagttccgtttccagccagtcgatatggccttcttcatcgcgcaaaatttctatcatcatatcgcggctgacgtaatcatgaacgctatcggcataaccaattgcctcacgcaaattcttcgcgccatccagctcaagtgccagatcagaacgcagcatttcctcaacatcttcaccaatgttcagtttgcccaggtcctgtaagtttggaagaccttccagaaaaagaatgcgctcaatataacgatcggcgtgtttcatctcatcaatggattcatgatactccacatcattgagacgtttgagaccccagtttttaaacatccgggcatgaagaaagtactgattgattgcgacaagctcatttcccaacagtttgttgagataatttataactttagtatcacctttcattttttgactccttcgcttccactctttgaagcgtagaacggcttacgagtaagtcaaaaaacacactccgtttatgcggactccttaaactccggcagttgcattaattcatcctccatcacttcacgcgcggcccggacacatttaccgcactgattgccgaccggaatgaatttttttaattgctggaacgagtggggggaaaactggcgcacagcctgacgaatttttttatcgctgataccattacaaagacaaacgtacatagagactcccgtatactttcttcaaaaataaatgaaaatagttcttatttcaattacggaaagactcttttttaagcaaagaatagaaatatgaataaaaataatgggctaccaaaagtagcccattgacaaaaaatgcggcgataccggaaggtatcgccaacacatttattgcttagtaaacggcgcgaagatttcgctaaatgcgtacttcggtgcctgttctttagtcaggccgtggaattccggagacaggttagtgccgcctggcaggtcgcgcgcgattgaccagataccaaccataccgagattacgcttctgcgcatcctgcatgaccagacgagcatcagagagatagaacacctcgccctgaacgtcgttcacgccaaccatcggcgtggtacccatcatagcgtcaatttctgcatcgctcttgttgggatggaggcctttcaattgtgaatgcaggttggcaatcgcagacgttgcacacttaccgtgaatgttctggccttcggtatttgcagactgacaaatcgcgttaccgtagtccattgtcatcacgttcacacccgccagctcaacacctttcgctttggcatcgctcaggacattcatcccttccggcgtcaggccagtcggcagaattggcaaggtgtaccagatagcaatatctttgccctctgacttccatttatcctgcactttcttcacagcaaggttacgacgttcaatagatgcctgatccgcaacccaggtgccttcgatatcgaagtccaggactctgaggttcaggttatcaacgatgtcataataatgctgcattagatcgtcaacgttcttacaggaagctgccagcggggcattattagcaccaccgatagacagcatcacatcaccgccagcctcacgcagagctttgattttgctgtactgagcgtaattctgcataccgtaagcggtaccccatgtcggtagacaggtgttcgcatctttactcaccacaaacgccagcgtgaagtggttgacgttatgattcttagccagcgcagccaaatccgggatcgtattcagcgtaaagtcgacatacggtgcataaacgtgtttcggccacgctttcttcggcgtacctacgcgctctttggttccggtccagtcaacaaaaacacgccacgggttgctgtcagaaggagaaactttctgcactttactctgagaaatgtagttctcaccgttaaagcgaatcagcgtatcactggcataaagcgtttctggattaaactgcggcgcattattcagctcttcgttgctatagctctgagtcttacctaacggcttccacgggcgactattgctaccggtggcgttttggttcgcaaccagagcagggttgtcactttgcgtccagaacagcgcttcataagcctgcccatcaacaacaacgcgatcacctttcacgtacacggtggaagcggaccatgctttcgccggttcgtatttcttccacgggttatcgccgccggggacaaagccccatgcgtcttgatcgacagaggttttataatgtgcatcgttataatctacgatgctgttcgcgctgtacgctttgctggcctggaaaccattcgcaataatgacgccgccattatcaatttcacaggtagtcgggttaccgtactgactcatttccgcagcggtagctgtacgcacgaggcgccatgggttattggagttttctacactggtgccacgcgggcaatcttcagaaccaacccaccaggcattctgataaacattaccattgaagataacatggtaaatttcgctgccttcctggccactccacgcctgcagtgagtaatcgttactgctatccgctggtgttgatggctcgttgttatccggagttggagtaactggagtttccggtgtttccggagttggatcaaccggagtcacagcaccgccattattatccggcttaacggaacaggagcctgggttaccatactgagtgatttctgttgccgttgccgcgcgaacataacgccatgggttgctggcatcgttttctttcgcatcgcctgggcaatttgccgcgcccacccaccaggcattcttataaatgccgccgttgtagataacgtaccatgtagaagaaccttcctgacctttccaggctacgacagcatagttgtcgtttgacttatcagctggggctggctgaacatcaggagccggtttaacgtccggtgccggtttcacatccggtgcaggctgtggtgctgaagtacaagactgtggattactggtttctgagatttccgttgccgtagcggcacgaacataacgccatgggttgctggcatcattgcctttcgcatcacccgggcagttagaagaggctacccaccaggcatttttatataccgcaccattaaagacgacataccaggtttgaccgccctgctgtttattccaggcaactacagaagaattagacggaacagtgccctgtgctggtgtagccgaaccgccattagcaggcgtattagatgctggcgtatttgaatttgaagaagatgagctgccgctcttttcgcaggaaagtgtattgccaaactgactaatttcagcagctgttgcggtacgctttaaacgccacgggttagttgcatcatttgctttcgcttttcccgggcaatttgtagaagaaacccaccaggcattttcataaattttgccatcgaaaataacctgatatttattaccaccttgttggttattccatgcttccattgccaatgctggcagagcggaacacaccagccccataccaatcatagatttagtaaatatatttaatttcattataatcccttgtaacgtaaaaactgcaaaacaaaagtcctacgcaggaattatttacgttttacgagaacccttcaatatgaattaaagtgcggcattaaaaataagaaaaaagcctgacaaatgaagcattttaaaaacagaaacattcatatttaaaatattaaattgaattgatattttaaatatgaataatttattcgttctgacagtacgaataagatatgcagtcaacaaatgcaaaaagggcgccgaagcgcccttttcaattcaaaactaattaacgtgtaattagcccagaactttagcaacaacgcccgcgccaacggtacggccgccttcacggattgcgaaacgcagaccgtcgtccatcgcgatcgggtggatcagggtaacaaccattttgatgttgtcgcccggcattaccatctctacgccttccggcagttcgatggtaccagtcacgtcagtagtacggaagtagaactgcggacggtagcctttgaagaacggagtatgacgaccgccttcatctttggacagaatgtacacttcagattcgaacttggtgtgcggcttgatggtgcccggcttagccagtacctgaccacgttcgatttcttcacgtttgataccacgcagcagaacacctacgttctcaccagcacggccttcgtccagcagtttgcggaacatttcaacgccagtacaggtagacttctgagtctctttgataccaacgatttcaacttcttcaccaactttgatgataccgcgttctacacgaccggtaacaacggtaccacgaccggagatggagaatacgtcttcgatcggcagcaggaacggcttgtcaatcgcacgctctggttccggaatgtaagaatccaggaagccagccagttccaggattttcgcttcccactctgcgtcgccttccagcgctttcagagcagaaccacgaacgatcggagtgtcgtcgcccgggaagtcgtactgagacagaagttcacgaacttccatttcaaccagttccagcagctcttcgtcatcaaccatgtcgcatttgttcaggaacacgatgatgtacggaacgcctacctgacgacccagcaggatgtgctcacgagtctgcggcatcgggccgtcagtcgcagcaactaccaggatcgcgccgtccatctgagcagcaccggtgatcatgtttttaacatagtcggcgtgccccgggcagtctacgtgcgcgtagtgacgggtcggggtgtcgtattcaacgtgagaagtgttgatggtgataccacgagctttttcttccggcgcgttatcgatctggtcgaatgcacgagcagcaccgccgtaggttttagccagtacggtggtgattgcagcggtcagagtagttttaccgtggtcaacgtggccgatagtaccaacgttaacgtgcggttttgtacgttcaaatttttctttagacacggctatattccttactatagtgctctccccttcaggagagagcacgggactttggtattaacccttaggcttatttaccacgggcttcaattacggcctgagcaacgttactcggcgcttcatcatacttcaggaattccatagtgtatgatgcgcgacctttggtcagagaacgcagctgagttgcatatccgaacatttcagacagcggtacttcagcgtggatcttaacgccagtaacttcagattcctgacctttgagcataccacgacgacggctcaagtcaccgataacgtcaccggtgttctcttcaggagtttctacttcaaccttcatgatcggctcaagcagaactggtttcgctttcttaaagccttctttaaaggcgatagaagcagccagtttaaacgccagttcagaggagtcaacgtcatggtaagaaccgaagtgcagacgaatacccatgtctactaccgggtagcctgccagcggacctgctttcagctgttcctggatacctttatcaacggccgggatgtattcgccagggattacaccacctttaatgtcgttgatgaactcgtagcctttcgggtttgaacccggctccagcgggtacatgtcgataacaacatgaccatactgaccacgaccaccagactgtttcgcgtgtttaccttcaacatcggtaactttctggcggatagtttcacggtaagcaacctgcggtttacctacgttcgcttcaacgttgaattcacgcttcatacggtcaacgatgatgtcgaggtgcagttcgcccatacccgcgatgatggtctggttagattcttcgtcagtccatacacggaaagacgggtcttctttagccagacggcccagagccagacccattttttcctggtcagctttggttttcggttcaactgcgatggagattaccggctcagggaattccatacgttccagaatgatcggcgcatccgggtcacacagggtgtcaccagtggttacgtctttcagaccgattgcagctgcgatgtcgcccgcgcgaacttctttgatctcttcacgtttgttagcgtgcatctgaacgatacgaccgaaacgctcacgtgcagctttcacggagttcagtacggtatcaccagagttaaccacaccggagtacacacggaagaaggtcaggttaccaacaaacgggtcggtagcgattttgaacgccagtgcagagaacggctcgtcatcacttgcgtgacgctcagccggagtgtctttaccgtcgtccaggataccgttgatcgcaggtacgtcaaccggggatggcaggtaatcaattaccgcatccagcatcgcctgaacacctttgttcttgaacgcagaaccacaggttaccaggatgatttcgttgttcagaacgcgctgacgcagagcacctttgatttctgcttcagtcagttcttcaccacccaggtatttttccatcagctcttcagaagcttcagctgcggattcgatcaggttctggtgccattcgttagccagttcaaccatgtctgccgggatatcttcgtattcgaaggttacgccctggtcagcgtcgttccagttgatagctttcattttcaccaggtcaacaacaccggtgaaatgttcttcagcaccaatcgccagctgcagcggaaccgggttcgcgcccagacgggttttgatctggttaacaactttcaggaagttcgcacccatgcggtccattttgttaacgaacgcaatacgcggaactttatatttgtttgcctgacgccatacggtttcagactgcggctgaacaccaccaactgcgcagtaaaccattaccgcaccatcgagaacacgcatggaacgttctacttcgattgtgaagtcaacgtgccccggggtgtcgatgatgttgatgcgatgcggctcatactgcttagccataccagaccagaatgcagtagtcgcagcggaagtgatggtaataccacgttcctgctcctgctccatccagtccatggttgcagcgccgtcatgaacttcaccgattttatggtttacaccggtgtagaacagaatacgttcggtagtagtggttttaccggcgtcgatgtgcgcactgataccgatgttacggtagcgtgcgatgggtgttgtacgagccatttgtttcctcgtttatcttttaggcgttcaatttaagtagcccaaagcgggctgcttactggaagcgcccgcctggtgactaaaactccgaagggattaccaacggtagtgtgcgaacgccttgttggcttcggccatacggtgaacgtcttcacgtttcttaactgcagtacctttgttttctgcagcatcagaaagttcgttcgccaggcgcagagccatggatttatcaccgcgtttacgagcagcttcaacgatccaacgcattgccagagcattacgacgaaccggacggacttcaactggtacctgataagtagaaccaccaacgcggcgagacttaacttctacagtcgggcgcacgttttcgagagctacttcgaatgcttccagttcagatttaccagagcgctgagccagggtctccagcgcgctgtatacgatagattcagcagtagattttttaccatctaccatcaggatatttacaaatttagccagcagttctgatccgaacttcggatccggcagaattttacgctgaccaatgacgcgacgacgtggcatggaaatactccgttgttaattcaggattgtccaaaactctacgagtttagtttgacatttaagttaaaacgtttggccttacttaacggagaaccattaagccttaggacgcttcacgccatacttggaacgagcctgcttacggtctttaacgccggagcagtcaagcgcaccacgtacggtgtggtaacgaacacccgggaggtctttaacacgaccaccacggatcaggatcacggagtgctcctgcaggttgtgaccttcaccaccgatgtaggaagtcacttcgaaaccgttagtcagacgaacacggcatactttacgcagcgcggagttcggttttttaggagtggtagtatatacacgagtacatacgccacgtttttgcgggcatgcttccagcgcaggcacgttgcttttcgcaactttgcgagcacgtggtttgcgtaccagctggttaactgttgccattaaatagctcctggttttagcttttgcttcgtaaacacgtaataaaacgtcctcacacaatatgaggacgccgaattttagggcgatgccgaaaaggtgtcaagaaatatacaacgatcccgccatcaccaggccatctggctggagtgcttaaccgtaagtctgacgaaatcagtatagtcaatgggaatgatgtcgttcgaaattcgaccagtcaaaccgcgggcaataaggtcttcgttcagagcatagaccttaatgggggcattacgcagactttcaaggtagcggttgccgtcaactgcggcagttacgccatcttgcaataatagcagttcgtcaccttcactgagcagacgcagcagcgcagcaaaatccgtcagccagggtgaacgatgtaatgtgtgcagcataaatgcctcaaaacctcaaaataacatcgtagttggcgagttcgcggcgtaaggcatctgcttcgagcggcgtggcttcgacaacaaaaggtgtctgcggatctaacccgcgttcgcgcagtgaagccgcacaaacccagcactgttcaatatcgtacagacccaacaatttaaaagtggcaatgtaatcacgcgccagcactgcatcgggcttttgtcctggcagcagctgaaaaacgccatcagcaataaagaagacggccagatcgtcagttaatgcggaagttgcgagtaaagcatctaatccctcgcggccagccgcggtgccatgaggcacagtagaaaaaacaaacgcaattcgtttcatcagaactgtaccaccctgtcacaggtcagcgaggcttccgccagcgcgccaagtccgcttaaggtaaatcccgtctgaaggtttgacgaagccagccccagtcttccggcttccgtttcatcaacaacgccacggcgtaatgccgccgctacgcagatattcagcgccacaccatgttgcatattcaactgttgccagctgcgcacaaggtcaaattcgtcgcttgccggtgaggtcaattggttagcgttatagaccccttcccgatagaaaaaaacgctgcttaactcatggccttctgctattagcgcctgcgcaaactgaaaagcactactcgcctgttgcgtaccgtatgctggcccggtcaccacgatggcaaaacgcattacttatcttgcccctggaaatcaccgctcttgaactggcggatgtagagatagacagtgtgtttggagatgttcaggcggtcagcaacctggttgatcgcgtctttaatatcgaagatccctttctcgtagagatttagcacgatctgacgatttttggcgttattagaaacattgcgatcggcattcacttcttcgatggtaaactccagcgtttgggtaaccagatcttcaacagaagaggcaaagttgacgcttgaaccgacatccggagtttccggcggcacaaaagtgctcataatctgcgagaagggaacatcaagattcatattgatgcacagcagaccaattacacgctgttcgcggttacgaatcgcgatagtcagggacttcattaatacgccgcttttggcgcgagtaaagtagcatttagaaacgctgctatccgctcccgtcatatcgtgcagcatacgtagcgccaggtcagtaattggcgaaccaatcttccggcctgtatgttcaccgttagcaatgcgaatggctgaacattttagatcctgcaaagagtgcaaaacgatttcacagtgggagccaataagcatcgctaacccgtccaccaccgcttcgtaggatttcagaatatcaaaatcggtctggtcaaaaggacgttgatccagtaaatccaactcactggtttcgttggttaaaagcgacctggacatgaaaaaaaacactccttttcaggagcctgtcgttaacttttcagggcaggctcattaatgatgcgggtaactaaattaatacagcggaggttccgctttccagcactaattatatccggcctgtaataaaaaaaccgccgcctggtcaggcggcggttcttagtgcttattttttagcagagtctgcggctttcgcatcagcttccggctttgcatcagccttcggcgctggtttcacatccagcagctctacgtcaaacaccagggtagaattcggtgggatccccggaacacccgctttgccgtaagccagttctggtggaataaccagtttgatcttaccgcctttcttgatgttcttcagaccttctgtccaacccgggataacaccgtccagacggaaagagagcggttcaccacgggtgtaagagttgtcgaactctttaccgtcgatcagcgtacctttgtagttcactacaacagtatcgctgtctttcggggcttcgcctttaccggcttctactacctgataaaccagaccagtggaagaggttttcacacctttctctttggcaaatttctcgcggtactctttaccttttgcttcgttatcagccgcgtctttttccatcttcgcctgagcagaagacttcacgcgagcttcgaatgcttgcagagtctgttcgatctcttggtcggaaagtttgctcttatcagcaaatgcatcctgaacaccagcgatcagctgatctttatccagtttgatgcccagtttttcttgttctttaagagagttttccatgtaacgacccagcgaagcacccagtgcataagctgatttctgatcgtcatttttgaacgctgctttgctgtcagcagttgtagcaggttttgcagcttcagcagcaaaagtgattggtgcatgcagggcaacggccattgtggtcgccagcagcgttactttaaacagtgatttcatccatatctccaggatcggggcatctcaccccagggttaactattatcagaagggtactataaagcgttgtcgaacaaatctacatacagacacgccctattatcatctattttcagactctttttgtttaaattagtttcgatgaccgcgaaatgagtgctgtctcgggcagcaaagttaagtagaatccgcggcgaccattcgacaaaagaggtgaatcatgcaggatttatcattggaagcacgcctggcagagctggagagccgactggcttttcaggaaatcaccattgaagaactgaacgtcacggtgaccgctcatgaaatggagatggcgaaactgcgcgatcatctgcgtctgctgaccgagaagttaaaagccagccagccgtcgaacatcgcgtcgcaggctgaagaaacgcctccgccacattattgaggcgtaaaaaaagcggggattccccgcttttttgtcaccttttcgatattagtggcaaccgcaaccgccgttgcctttaccgccacagcagccttcgccaccgtgttcatgaccgtgatcgtggccatgaccaccgcagcaaccgtcgtggtcgtgatcgtggtggtgatcgtgcgcgccgtgaacgtgaccatgagccagttcttcttcggtcgcttcgcgaatcgccacaacttcaacgttgaatttcaggttctgaccagccagcatgtggttaccatcaaccactacgtgatcgtcttcaaccgcagtgatttcaaccggtaccggaccctggtcggtttcagccaggaaacgcatacctacctgcagttcatcaacgcccataaatacgtctttaggaacgcgctgcaccaggttttcgtcgtactgaccgtaagcgtcgttcgcgccaacagcgacatcaaatttgtcgccaacttcatgaccttccagcgctgtttccaggccagagatcagggaaccgtgaccatgcaggtagtccagcggcgcactcaccggagactcatcaaccaacacaccgtcttctgtacgtacctgataggccaggctgaccaccaggtcttttgctactttcatgatatctcctgagcatgggaagaatagtggcgcagattgtagcggaattctgcagccgtgtactcactagcttaaaaaaactcggcgcatatcgctagtccggatgaaaaatcccaatcacttgctcatctttgcggacgtgatcgcgggcttctttgtctgcttctcgcatctgatgtccacacttaacacattcaacgatatcaatattattttcgcgccacatcgccattgaatcctgtgcctgacaggccgggcattttgcgcccgcaataaaacgttttcggattgccatctttaccctctactcaaattcatcccagccgtccagctggcgtcgttcttgttgcatttcacgctggaaaatctcttccagttcacgtcgggcttccctggcgcgagaaatttgtacggtatcagcatgcatcgggattaactcccgcagcattcgcatatccaggcggcgaaaatgcagttgcgcgcgctgcgcctgatgcggatgcatgccaagcgtgaccagcgtcttgcgccccagctctaacgcactggagaatgtttcacgggaaaactgcgtcacccctgcctgtaataactcatgcgcttccacacgtccgcgcgctcgcgcaagaatatgcaaatgcggaaagtgctgctggcatatttccaccagcttcatagtgtcttccggctcgttacaggtaatgacgatagactcagcggcctctgcacccgcagaacgtaaaagatctacctgcgtggcgtcgccgtaataaactttgtagccatatttgcgcatcaggttaacggcactgatatcccgctccagtacagtaatgcgcattttatttgccatcagcaaacgaccaatcacctgaccaaaacgcccaaagcccacgacaatgacctgcggtttatcatcgttgacccatggtttttcgtcttcttcttccggtccgttaaactggcgggatagccatttatcgaccagcttcatcagcagcggcgtggtcatcatggaaagcgtcaccgtcaccagcaacagcgccatctggtcgccctggaataagcgttgtgaagaagcggtagaaaagaggacaaaggcaaactcaccgccctgactcaacacgccagcaaactgcatccgctcagaactgcgcacgccatacaatcgcgccagcagatacagcacgagaattttcaccgccaccagcacaaccacacttatcactacccacaacagatgggtataaagcaccccgaggttgagcgacatgccgacagagataaagaacaaaccgagcagcaagcctttgaagggatcgatagccgtttccagttcatggcgatattcactttccgccagtagcacacccgcaataaacgtaccgagcgccatcgacaaccccagcgcatccataaacaatgcggaacccaacaccagcagcagcgtcgcagcggtgaacacttcccgcacgccagaagctgcaataaaacggaataccggacgcagtaaatagcgcccgccaatcagcatgccgacaaacgccagcaccttcatgccgatcttcatccagtcgaaatgttcgtctgccgaacccgccaacaacggcactaacgccagtgccgggatcaccgccagatcctgaaacagcagtaccgagaaacctaactggccggattcgctgcgattcatccctttctcacgcatcaattgcaacgccattgcagttgaagacatcgcaaggccaatgccaccgaccaccgccgcctgccatgagaaatgggtcagcatcaataatcctgccagcaacgccgcgcttaacagcacctgtgccgcgcctacgccaaaaatcgaacgccgcagttgccaaagcttggagggattcaactcaaggccgatgataaacatcaggaataccacgccgagttccgaaaagtggaggatctcatcgacgtcgctaataaaccccagcccccacgggccaatcgcaatccccgccagcaaatatcccaacactgcaccaatacccagccgcgatgccagcggcaccgcagccaccgccgcgaagagaaacagcactcctgcgagtaaaaaatcagaaccttccatcagcggcctcctggagacagcggatttgccagccagtcaccgtaggctctggcgtggctcgccagctcctgtgcgctttgccgtctcgcccagtaaataatgatggggcttaaccaatgcatccggcacatgcccgccgccagttcaaaggggcgcagaacatcgctcatcgggtagcgattcaacgcgtcataacggtaagcactttccggctccccggtggtaatcacgctacgccagtactttcccgccagttggtttccccccggtccgctggcaaaaccacggcttaatacccggtccagccactctttcagtagcgccgggcagctataggtataaagaggatgctgaaagacaatcacctcgtgctcgcgcagtaatgcctgctcacgagggatatcaataaaaaagtcgggatagtgcgcgtaaaggtcgtgcacggtaacattgctgagctgcgtggccggtttaagcagaacccggtttgccaccgagtcctgagattccggatgggcatacagcagcaaaactttcgctggctgagacatcatccccctcccggtatggtttttgtgtatagtcgctgttttgggctaccattgcgcccggtgcggcagctcgcccatacattacattatcataatgataagttaacatagtctgaacatacggcgccttatgattgttttttcctcgttacaaattcgtcgcggcgtgcgcgtcctgctggataatgccaccgccaccatcaaccctgggcagaaagtcggcctggtgggtaaaaacggctgtggtaaatctaccctgctggcattgctgaaaaatgaaatcagcgccgacggcggcagctacacctttccgggaagctggcaactggcgtgggtgaatcaggaaacaccggcgttaccgcaagcggcgctggaatatgtcattgacggcgaccgtgaatatcgtcaactggaagcgcagctacacgacgccaacgaacgtaacgacgggcacgccattgcgaccattcatggcaagctggatgctattgacgcatggagtattcgctcccgtgccgccagcctgctgcacggcctcggtttcagcaatgaacaactggagcgcccggtaagtgatttctccggtggctggcgtatgcgtcttaaccttgcccaggcgctgatttgccgttcagacttgctgctgctcgacgaaccgactaaccacctcgatctcgatgccgttatctggctggaaaaatggctgaagagctatcagggcacgctgatcctgatctctcacgatcgcgatttcctcgatccgatcgttgataaaattattcatatcgaacaacaaagcatgttcgagtacaccggcaactacagttcgtttgaagtacagcgcgccacccgtctggcgcagcaacaagcgatgtatgaaagccagcaggaacgcgtggcgcatttgcaaagttatatcgaccgtttccgtgccaaagccaccaaagcgaagcaggcccagagccgcatcaagatgctcgagcgtatggagctgattgcccccgcgcacgtcgacaacccgttccgctttagcttccgcgcgccggaaagcctgcctaatccgttattaaagatggaaaaagtcagcgcaggctatggtgatcgcattattctcgactcgattaaactgaatctggtccccggctcgcgcattggtctgttaggccgcaacggcgcgggtaaatcgacattaatcaaactgttagccggcgaacttgcgccagtcagcggtgaaattggtctggcgaaagggatcaagctcggctacttcgcccagcatcaactggaatacctgcgcgccgacgaatcgcctcttcaacatctggcacgtttagcgccgcaggagctggaacaaaaactgcgtgactacctcggcggctttggtttccagggcgataaagtaaccgaagaaacgcgccgcttctccggtggggaaaaagcccgcctggtgctggcattaattgtctggcagcgtccgaatctgctgctgctcgacgaaccgaccaaccaccttgacctcgacatgcgtcaggcactcaccgaagcattaatcgagttcgaaggcgcgctggttgtcgtctcgcacgaccgtcatttgctgcgttccaccactgacgatctctacctggttcacgatcgtaaagtcgaaccgttcgacggcgatctggaagattatcaacagtggttgagcgacgtacaaaagcaggaaaaccagaccgacgaagcgccaaaagagaacgcgaacagcgcccaggcacgtaaagatcagaagcgtcgggaagcggagctgcgtgcgcaaacccagccactgcgtaaagagattgcccgtctggaaaaagagatggagaagctgaacgcgcaactggcgcaggcggaagagaaactcggcgacagcgaactgtacgatcaaaaccgtaaagcggagttgaccgcctgcctgcaacagcaagccagcgccaaatccggcctggaagagtgcgaaatggcatggctggaagcccaggagcagcttgagcagatgctgctggaaggccaaagcaactgatggcgcagataacaacgaccgatgccaatgaatttagcagcagtgctgaattcacccctatgcgcggctttagcaattgtcatctacaaaccatgctgccgcgtctgttccgtcgcaaggtgaaattcaccccgtactggcagcggctggagttgcccgacggcgattttgtcgatctcgcgtggagtgaagatcctgcacaggcgcggcataaaccgcgtttagtggtatttcacgggctggaaggcagtctcaatagcccttacgctcacggtctggttgaggcggcgcaaaagcgcggctggctgggcgtggtgatgcattttcgcggatgcagcggtgaaccaaaccgtatgcaccgcatttaccattcgggcgaaaccgaagacgccagttggtttttacgctggctgcaacgcgagtttggtcatgcgccaacggctgccgtcggctattcgctcggcggtaatatgctggcctgtttgctggcaaaagaaggcaatgatctcccgattgatgcggcagtgattgtctctgcgccgtttatgctggaggcctgtagttaccatatggaaaagggcttttcccgcatttatcagcgttacttgctgaacctgttaaaagccaatgccgcgcgcaagctggcagcctaccccggaacactgccgattaatctcacgcagttaaaatcggtacgtcgcatccgtgaatttgacgatctcatcaccgccagaattcacggctacgctgacgctatcgactattatcgtcagtgtagcgccatgccgatgctcaatcggatagccaaaccgacactgattattcacgccaaagacgatccgtttatggatcatcaggtgatcccgaaaccggaaagtctccccccgcaggtggagtatcagctgactgaacatggcggtcatgttggctttattggcggtacattacttcatccgcaaatgtggctggagtcacgcattcctgactggttaacaacgtatctggaggcgaaatcatgttgattccgtggcaagacctctcccccgaaacgctggaaaatttaattgaaagctttgtgttacgtgaaggcaccgattatggtgaacatgagcgtacacttgaacagaaagtcgccgacgtcaaacgccagctacagtgcggagaagcggtgctggtatggtcggagctgcacgaaacggtcaatatcatgccgcgcagtcagtttcgcgaataacctgcaaccgtcggcggacgagataataatgatagctaagtcatggagttactatgtctgccaaacatccggtcattgcggtaacaggatccagcggcgcggggaccaccaccaccagcctcgcgtttcgtaaaatattcgcgcagttaaatctgcatgcagccgaggtggaaggcgacagttttcaccgttatacccgcccggaaatggacatggcgatccgcaaagcgcgcgacgccgggcggcatatcagctacttcggccccgaagcgaacgacttcggcctgctggaacaaaccttcattgaatacggtcagagcggcaaagggaaatctcgcaaatatctgcatacctacgacgaagccgtaccgtggaatcaggtaccggggacattcaccccctggcaatctttaccggaacccactgatgtactgttttatgaaggtttacacggcggcgtagtcacgccacagcataacgttgcgcagcatgtggacttactggtcggcgtggtgcctatcgttaaccttgagtggattcaaaaactgatccgcgacaccagcgagcgcgggcactcacgagaagcagtgatggactcggtagtgcgttcaatggaagactatatcaactacatcacaccgcagttttcccgcacccatcttaatttccagcgcgttcccaccgtcgacacctcaaatccgttcgcggcaaaaggtatcccgtcgctggatgaaagctttgtggtgatccattttcgtaatctggaagggatcgatttcccctggctgctggcgatgttgcaaggctcattcatttcccacatcaatacgttagtggtgcctggcggcaaaatgggtctggcaatggaattaattatgctgccgctggtgcaacgattgatggaaggaaagaaaatcgagtaacgctgctattacgccggataaaatactatccggcttcacaacgggatagttaaatcacgcggcaaccacttcatacgagtgagtaatattcaccgctttttccagcatcagcgccactgaacaatatttctcggcagagagatcaaccgcacgtgcaaccgctgcgtctttcaggtcgcgaccggtaacgataaaatgcagattaatgtgcgtaaacaggcgtggtgcctcttcgcggcgttcagaggtcaattttacttcacaatcgaccacatcctgacgccctttttgcaggatagaaaccacatcgatggcactgcaaccacccgctgccatcaacaccatttccatcgggcttggtgctttatcgcctgagttgccgtccattaaaatctggtgaccagaggcggattcgcccagaaaagttaacccttcgacccacttcactcgcgcttgcatttttgctactccactgcgtcaattttcctgacagagtacgcgtactaaccaaatcgcgcaacggaaggcgacctgggtcatgctgaagcgagacaccaggagacacaaagcgaaagctatgctaaaacagtcaggatgctacagtaatatattgatgtactgcatgtatgcaaaggacgccacattaccgtgcagtacagttgatagccccttcccaggtagcgggaagcatatttcggcaatccagagacagcggcgttatctggctctggagaaagcttataacagaggataaccgcgcatggtgcttggcaaaccgcaaacagacccgactctcgaatggttcttgtctcattgccacattcataagtacccatccaagagcacgcttattcaccagggtgaaaaagcggaaacgctgtactacatcgttaaaggctctgtggcagtgctgatcaaagacgaagagggtaaagaaatgatcctctcctatctgaatcagggtgattttattggcgaactgggcctgtttgaagagggccaggaacgtagcgcatgggtacgtgcgaaaaccgcctgtgaagtggctgaaatttcgtacaaaaaatttcgccaattgattcaggtaaacccggacattctgatgcgtctgtctgcacagatggcgcgtcgtctgcaagtcacttcagagaaagtgggcaacctggcgttcctcgacgtgacgggccgcattgcacagactctgctgaatctggcaaaacaaccggatgctatgactcacccggacggtatgcaaatcaaaattacccgtcaggaaatcggtcagattgtcggctgttctcgtgaaaccgtgggacgcattctgaagatgctggaagatcagaacctgatctccgcacacggtaaaaccatcgtcgtttacggcactcgttaatcccgtcagagtggcgcgttacctggtagcgcgccattttgtttcccccgatgtggcgcagactgatttatcaccccgatatcaactatgcacttcgacaaacgctggtgctatgtttgcccgtggccgttgggttaatgcttggcgaattacgattcggcctgctcttctccctcgttcctgcctgttgcaatattgcgggccttgatacgcctcataaacgttttttcaaacgcttaatcattggtgcgtcgctgtttgccacctgtagcttgctgacacaggtgctactggcaaaagatgttcccctgccctttttgctgaccggattaacgctggtacttggcgtcactgctgaactggggccattgcacgcaaaattgcttcccgcatcgctgctcgctgccatttttaccctcagtctggcgggatacatgccggtctgggaaccgttgctcatctatgcgctgggcactttgtggtacggattgtttaactggttttggttctggatctggcgcgaacaaccgctacgcgagtcactaagtctgctgtaccgtgaactggcagattactgtgaagccaaatacagcctgcttacccagcacaccgaccctgataaagcgctgccgccgctgctggtgcgccagcaaaaagcggtcgatctaattacccagtgctatcagcaaatgcatatgctttccgcgcaaaataataccgattacaagcggatgctgcgtattttccaggaggcgctggatttgcaggaacatatttcggtcagtttgcatcagccggaagaggtgcaaaagctggtcgagcgtagccatgcggaagaagttatccgctggaatgcgcaaaccgtcgccgctcgcctgcgcgtgctggctgatgacattctttaccatcgcctgccaacgcgttttacgatggaaaagcaaattggcgcactggaaaaaatcgcccgccaacacccggataatccggttgggcaattctgctactggcatttcagccgcattgctcgtgtgctgcgcacccaaaaaccgctctatgcccgtgacttactggccgataaacagcggcgaatgccattacttccggcgctgaaaagttatctgtcactaaagtctccagcgctacgcaatgccggacgactcagtgtgatgttaagcgttgccagcctgatgggcaccgcgcttcatctgccgaagtcgtactggatcctgatgacagtattgctggtgacgcaaaatggctatggcgcaacccgtctgaggattgtaaatcgctccgtgggaaccgtggtcgggttaatcattgcaggcgtgacgctacactttaaaattcccgaaggttacaccctgaccttgatgctgattaccaccctcgccagctacctgatattgcgcaaaaactacggctgggcgacggtcggttttactattaccgcagtgtataccctgcaactgttgtggctgaacggtgagcagtacatccttccgcgtcttatcgataccattattggttgtttaattgctttcggcggtactgtctggctgtggccgcagtggcagagcgggttattgcgtaagaacgcccatgacgctttagaagcctatcaggacgcgattcgcttgattctgagcgaggacccgcaacctacgccactggcctggcagcgaatgcgggtaaatcaggcgcataacactctgtataactcattgaatcaggcgatgcaggaaccggcgtttaacagccattatctggcagatatgaaactgtgggtaacgcacagccagtttattgttgagcatattaatgccatgaccacgctggcgcgggaacaccgggcattgccaccggaactggcacaagagtatttacagtcttgtgaaatcgccattcagcgttgtcagcagcgactggagtatgacgaaccgggtagttctggcgatgccaatatcatggatgcgccggagatgcagccgcacgaaggcgcggcaggtacgctggagcagcatttacaacgggttattggtcatctgaacaccatgcacaccatttcgtcgatggcatggcggcagcgaccgcatcacgggatttggctgagtcgcaagttgcgggattcgaaggcgtaatacaggctaaaccatcggatgaggtgttcacgccgcatccgacatcttttgcctgatgcgtcttatttacgccccaaccaccttcgccaccgcgtgggcgaaacgatgcatcccttcatcgatatccgcatcttccaccaccagcgacggcgcaaaacgcatcacatcaggcccggcattcagcaccattacgccttcctctgcacccgcatacaggaaatcacgcgcccgacctttgtactgtggtttcagctctgcgccaatcaacagccccataccgcgaatatcgctaaacacatcgtactgctgatcgatcttctgcaaatggtcaacaaaatgctggcgtttcgcttgaataccttccagcacttcaggggtattgatgatatcaaacgctgcgcccgctactgcacaggccagaggattaccgccgtaggtggaaccgtgagaaccaggatgaaacgcggaagcaatctccgccgtggtcagcatggcgctaaccgggaagccgccgcctagcgctttcgcagaggtcagaatatccggcgtcacgccgtagtgcatataagcaaacagatcgccggtccgccccatcccgcactgcacttcatcaaacaccaataatgcctgatgctgatcacacagctcgcgcaagccctgcaaaaactctggcgtcgctgccgtcacgccgccctcgccctgaatcggctcaaccaccaccgcacaggtatggtcatccatcacggcttttactgcgtgaagatcgttaaaaggcacgtggatgatgtctgccggttttggcccaaagccgtcggaatattttggctgcccgcccaccgagacggtaaacagcgaacgaccatgaaaagcgttatggaaggcaataattttggttttgaacgggctatgacgcacacaggcgtaatggcgtgccagtttaaaggcggtttcgttagcttccgtgccggagttcataaacaccacgcgttcggcaaacgttgcctcaatcagtttacggccaagacgcagcgccggctcattggtgaaaacgttactaatatgccacagagtttcgccctgggtttttaacgcgttcaccagcgcaggatggcaatggcccaacgccgtaactgcaatgccacccgcgaaatcgacatactccttgccctgttgatcccagattcggctgccctgaccttttaccggaataaactctgccggagcataaatcggcagaatcacttcatcgaaagtcgcgcgtgtaattgctgtttgttcaattgccatctcatgatcaccctgttacgcataaataaatatgaaattataatcacaaaatatgcataaaaaatcactgaatggcaatcagaaatcagcgatgcagaaaattagccagcagttgatgtccttgttcgctaagaatactttctggatggaattgcacaccttccagatcccactggcgatggcgaatccccataatctcgcgggtttcgctccaggccgtcacttcaaagcactccggtaatgagtcaggttccaccaccagcgaatggtagcgtgtcacggtgagtggatttgccagccccttaaatacgcccacaccattatgtgtaatcggcgaggttttgccgtgcatgacctttgcggcgcgcacaactttgccgccaaatgcctgcgccattgcctgatgaccgaggcagacgccaagaatcggcaagcgtccggcatagtgacgaataacgtcaagggagatcccggcttcatctggcgtacaggggccgggtgagatgacaattttttgtggtttaagggcgtcgatatccgccaacgtcaacgcatcgttgcgcttaaccaacacatccgcccccagttcacaaaagtactggtagaggttccaggtaaaagaatcgtagttatcaataagcaggatcatggcggctccggtacgaaagaaccgcgctattttactcagattccccggcttcgcttaccactttgctaaatatcatctgcagcgcggtgagatcccccattgccccattctgatttgcctgattccaggcctctttttcgataccctgccagctcagttgatatccggcatgaatcgccagttgctcgaagaagatccgctgtgccaaaccacttcccacccggaagggatgcagcacgttgatttcacaatagtaatgcgccagccgctcgacgaacttcgctttctccaggccaaccagataaccttcttcctccagatcctgcatcagggcattgccctctttttcgatataagcaaagtggcagaacggcgtatcgccctgataaatatcgacttcgcgcagttgccccgcccagtcgaaaatatcctgatacagctggcgatggatagtgcgcaaatgcggtaaaccccgaaccaacgggccaagttcaatggtcgcagcacgcagcgccgtcatttcgtaagcggcctgttccagccgctgctgctggcggatgttcagccggttacgcatgatatcaaggcctggataaagatacggatcgcgcccttcgccgaatttatcgctcatagtgcctcctcagcgcttcaagacgcgctaaagcctctgcggcagtaagagtgactaaaggcatctcgacgccttcaagacggcgactggcctggaaattacgattacgctgaagctcccagagacgggacttttgcttatcggtgagtttcttcacttgatgcctccctgaacgtgtccatttgccacaagtataagcggcaaatccgggttacgccgggagagcagaagcgcgggcaagattgcccgcgcgagaaatcattacggcaggactttagcggaaaggataactaccggttttgacggcacattctggtacggaccaacgtcatgagtcggcacctgggaaatcttatcggcaacgtccatgcctttcaccactttaccaaataccgcgtaaccgaaatcacgctgaccgtggtcaaggaaggcgttatcggcaacgttgataaagaactggctggtggcgctgtctttgtcagcggtacgcgccatcgcgatggtgccacgcgtgttgcgcaggccgttatcagcttcatttttgattggcgggtttggttttttctgctgcatctgctcggtgaaaccgccgccctgaatcataaagccaggaatgacgcggtgaaaggtcgtgttgttataaaaaccactgttcacataatcgacaaagttttgcacagacactggcgctttttgtttatccagctccagttcgatgttaccagctgaggttgtcaacaatacgtgcgggtcccctttcgctgccattgctgcgggagaaagagcagaaagggcgaaaacagcagccatcgccgccagggtcgatttgaacatgagatttccttaacaaacagagcagaaaaaaagcaagtgaagagattctaaatagccttcaagaacaaggccatccctttacctaattttacgtatctgaaatatatgtaacctgaggataactttttattccgtgaccaaaatcacctcttaaaatgcaatttagcaaccgattgcaataaaacatttaatcagatcacaaaatcgcctaaaatcgcccgctcgcggcatagcccgctatgccattttatttttgaacgcaggccaatcatgactaacagcaatcgcatcaagctcacatggattagctttctttcctacgcactgaccggtgcgttggttattgtcaccgggatggtgatgggaaatatcgccgattatttcaatctgcctgtttccagcatgagtaacaccttcaccttcctcaatgccggcattttaatctctatcttcctcaacgcctggctgatggaaatcgtcccgttgaaaacgcagttacgttttggctttctcctgatggtgctggcggttgccggtttgatgttcagccacagcctggcgctgttctcggcggcgatgttcattctcggggtggtcagcggcatcaccatgtcgattggtacattcctggtaacacaaatgtatgaaggacgtcagcgcggttcacgcctgttatttaccgactccttcttcagtatggccgggatgattttcccaatgatcgccgcgtttctgctggcacgtagcattgagtggtactgggtttatgcctgcatcgggctggtatatgtcgctatttttattctgaccttcggctgtgagttcccggcgctgggcaaacatgcgccaaaaacggatgctccggtagagaaagaaaagtgggggatcggcgtactgtttctctctgttgcggcgctgtgctacatcctcggtcagttaggttttatctcctgggtgccagaatatgccaaaggtctgggtatgagcctgaatgacgctggcacgctggtaagtaacttctggatgtcgtacatggtcggcatgtgggcgttcagctttattcttcgcttctttgatttgcagcgcattctgaccgtactggctggtctggctgcgattctgatgtacgtctttaacaccggaacaccggcacatatggcgtggtcaattctcgccctgggcttcttctccagcgcgatctataccaccatcatcaccctgggttcacagcagaccaaagtaccgtcgccaaaactggttaactttgtcctgacctgcgggaccatcggtactatgttgacctttgtggttaccggcccgattgttgaacatagtggtccgcaggcggcgctgctgacggcaaacggtctgtacgctgtcgtctttgtgatgtgcttcctgttaggtttcgtcagccgtcaccgtcagcataacaccctgacctctcattaattgttcatgccgggcggcactatcgtcgtccggccttttcctctcttactctgctacgtacatctatttctataaatccgttcaatttgtctgttttttgcacaaacatgaaatatcagacaattccgtgacttaagaaaatttatacaaatcagcaatataccccttaaggagtatataaaggtgaatttgatttacatcaataagcggggttgctgaatcgttaaggtaggcggtaatagaaaagaaatcgaggcaaaaatgagcaaagtcagactcgcaattatcggtaacggtatggtcggccatcgctttatcgaagatcttcttgataaatctgatgcggccaactttgatattaccgttttctgtgaagaaccgcgcatcgcttatgaccgcgtacacctctcgtcttacttctctcaccacaccgccgaagagctgtcgctggtgcgcgaaggcttctacgagaaacacggcatcaaagttctggtcggcgaacgcgctatcaccatcaaccgtcaggagaaggtgattcactccagcgccggacgtaccgttttttatgacaagctgatcatggcgaccggttcctacccgtggatcccgccaattaaaggttctgatactcaggactgctttgtctatcgcaccattgaagacctcaacgccattgaatcctgcgctcgtcgcagcaagcgcggtgccgttgttggtggcggcctgttaggtctggaagctgctggcgcgctgaaaaacttaggcattgaaacccacgttatcgaatttgcccctatgctgatggcggaacagcttgatcagatgggcggcgagcagctgcgtcgcaaaatcgaaagtatgggcgtgcgcgttcacaccagcaaaaacactcttgagattgtgcaggaaggtgttgaagcgcgtaaaaccatgcgttttgccgacggcagcgaactggaagtcgactttatcgtcttctctaccggtatccgtccgcgcgataagctggcaacccagtgtggtctggacgttgctccgcgtgggggtatcgtcataaatgattcctgccagacttccgatccggatatctacgccatcggtgaatgcgcaagctggaacaaccgtgtatttggtctggtagcaccaggctacaaaatggcgcaggtcgccgttgaccatattcttggtagcgaaaacgcctttgaaggtgcagaccttagcgccaagctgaaactgctgggcgtagacgtaggcggtattggtgatgcgcacggtcgcacgcctggcgcacgtagctacgtttacctcgacgaaagcaaagagatctacaaacgcctgattgtcagcgaagacaacaaaaccctgctcggtgcggtactggtgggcgataccagcgactacggcaacctgctgcaactggtgctgaacgctatcgagctgccggaaaacccggattccctgatcctgccagcgcactcgggtagcggtaagccgtctatcggtgttgataaactgccggacagcgcgcaaatctgctcctgcttcgacgtcaccaaaggcgacctgattgctgctatcaacaaaggctgccacaccgttgcggcgctgaaagccgaaaccaaagccggtacgggctgcggcggttgtattccgctggtcactcaggtactgaacgcggaactggcgaaacagggtatcgaagttaacaacaacctgtgtgaacactttgcttattcgcgtcaggaactgttccatttgatccgcgttgaaggcattaaaaccttcgaagaactgctggcgaaacacggcaaaggttacggttgtgaagtttgtaaaccgaccgtcggttcgctgttggcctcctgctggaacgaatacattctgaagccggaacatactccgctgcaggattctaacgacaacttcctcgcgaacatccagaaagacggcacctactcggtgatcccgcgttctccgggcggtgaaatcaccccggaagggctgatggcagtgggtcgtatcgcgcgtgaatttaatctctacaccaaaatcaccggctctcagcgcctggcgatgtttggcgcacagaaagacgatctgccagagatctggcgtcaactgattgaagccggcttcgaaaccggtcatgcctatgcgaaagcactgcgtatggcgaaaacctgcgtgggaagcacctggtgccgctacggtgttggcgacagcgtcggcctcggcgtggaactggaaaaccgttacaaaggcatccgtacgccgcacaaaatgaagttcggtgtctccggctgtacccgtgaatgttcagaagctcagggtaaagacgtgggtattatcgccaccgaaaaaggctggaacctgtacgtttgcggtaacggcggcatgaaaccgcgtcatgcggatctgctggcagcggatatcgatcgcgaaacgctgatcaaatatctcgaccgcttcatgatgttctacatccgtactgccgacaaactgacgcgtaccgcgccgtggttagaaaacctcgaaggtggcatcgattacctgaaagcggtgatcattgacgacaaactggggctgaacgctcatctggaagaagagatggcgcgcctgcgggaagcggtagtgtgcgaatggactgaaacggtcaatacgccgtctgcgcagactcgcttcaaacacttcatcaacagcgacaagcgtgacccgaacgtgcagatggtgccagagcgcgaacagcaccgtccggcaacgccgtatgaacgtatcccggtaactctggtggaggacaacgcatgagccagtggaaagacatctgcaaaatcgatgacatcctgcctgaaaccggcgtctgcgcgctgttaggtgacgaacaagtagcaattttccgcccgtatcacagcgatcaggtgtttgcgatcagcaacatcgacccgttcttcgagtccagcgtgctgtcacgcgggttgattgcggaacaccagggcgagctgtgggtcgccagtccgctgaaaaagcagcgttttcgcttaagcgacggcttgtgcatggaagacgaacagttttccgtcaagcattacgacgcgcgagtgaaagacggcgtggtacagctgcgcggttaatattttaacgggaggcgcaatgcctcccctttttgcatggtcctgtaataaccttcggtatattgcaggacattttttaaactttttgttttattttttgtttttattttttaaaggataatcaaatgtttacagacactattactaagtgtgcggctaacgctgcgcgcattgcacgcctgtcggcaaataacccgctcggcttttgggtcagctccgcgatggcgggcgcgtatgtgggtcttgggatcatcctgattttcacgctcggtaatttgctcgacccgtccgtacgtcctctggtgatgggcgcgacctttggtatcgccttaacgctggtgattatcgccggttctgaattgttcaccggacacaccatgttcctcacctttggggtgaaagcgggcaccatcagccacgggcaaatgtgggcaatcctgccgcaaacctggctgggtaacctggtcggttccgtcttcgttgccatgctttatagctggggcggcggtagcctgctgccggtagataccagcatcgttcactccgttgcgctggctaaaaccactgcaccggcaatggtactgttcttcaaaggtgcattgtgtaactggctggtttgcctggcaatctggatggcgctgcgcactgaaggggcggcgaaatttatcgctatctggtggtgtttgctggcatttatcgcgtccggctacgagcactccatcgctaacatgacgctgttcgcactctcctggttcggcaaccacagcgaagcctacacgctggcgggcattggtcataacctgctgtgggtgacgctgggtaatactttatcgggtgccgtattcatgggattgggttattggtatgctacgccgaaagcgaatcgtccggttgcggacaaatttaatcaaactgaaacggctgccggttaattactaaggggtttttacgtggatcatttgcctatattttgccaattacgcgatcgcgactgtctgattgtcggcggtggtgatgtcgcggaacgcaaagcaaggttgctgttagacgcaggcgctcgcttaacggtgaatgcattagcgtttattccacagttcaccgcatgggcagatgcaggcatgttaaccctcgtcgaagggccatttgatgaaagccttctcgacacctgctggctggcgattgcagcgacagatgatgacgcgcttaaccagcgcgtcagcgaagccgctgaagctcgtcgcatcttctgtaacgtggtcgatgcgccgaaagccgccagctttattatgccgtcgattattgaccgctcgccgctcatggtagcggtctcctctggcggcacctctccggttctggcgcgcctgttgcgcgaaaaactcgaatcactgctgccgttacatctgggccaggtagcgaaatacgccgggcaattacgcgggcgagtgaaacaacagttcgccacgatgggtgagcgtcgccgtttctgggagaaattattcgttaacgaccgcctggcgcagtcgctggccaacaacgatcagaaagccattactgaaaccaccgaacagttaatcaacgaaccgctcgaccatcgcggtgaagtggtgctggttggtgcaggtccgggcgatgccggactgctgacactgaaaggtctgcaacaaattcagcaggcagatgtggtggtctacgaccgtctggtttctgacgatattatgaatctggtacgccgcgatgctgatcgcgttttcgtcggcaaacgcgcgggataccactgcgtaccgcaggaagagattaaccagatcctgctgcgggaagcgcaaaaaggtaaacgcgtggtgcgtctgaaaggcggcgatccgtttattttcgggcgtggcggagaagagctggaaacactgtgcaacgcgggtattccattctcggtggttccgggtattaccgcagcttctggttgctctgcctattcgggtattccgctcacgcatcgcgattatgcccagagcgtacgcttaattactggacacttaaaaaccggtggcgagctggactgggaaaacctggcggcagaaaaacagacgctggtgttttatatggggctgaatcaggctgcaactattcagcaaaagctgattgaatacggtatgcctggtgaaatgccggtggcaattgtcgaaaacggaacggcagtcacgcagcgcgtgattgacggtacgctcacgcagctgggcgaactggcgcagcaaatgaacagtccatcgctaattattattggtcgggttgttggcctgcgcgataaattgaactggttctctaaccattaatttaaccagggccagagaagtctggcctttttcgtttacaactctctttatatattcagcagataaaaacataaccccttaataaatattgtctgctaatgggttattttcaccgttacagcgacttacaaaattaaatcaatcgctcactgacgctaattgaatatttctgtatcgttcttaatgagcagtctgcttatattcatataatcaatgaatgttaattaatatataatacatagggaatgtaaatgaacaaatttattaaagttgcactggtaggcgcagtactggctacgttaactgcatgtactggtcatattgaaaaccgtgataagaactgctcttacgactacctgctgcacccggctatttctatttctaaaatcattggcggttgcggtccgactgcacagtaagccattgacagaaatcggctaacgccggtttaattgcctgacgccctcgagattacccgagggcgtatttgtttctgcattcttttcaaaaatatcgtttacaacgattaaatgctggcaatactttcacgcaagatccgcaatatcgtctcttcaccgctgcgatttgggttaatgcgaatcgcgcaatgttctaactgcggattcgcctggcgaaacgttccggaaagtcgataaaagagcggcgggatttcatatttcgactctgcaccaaccgggtaaggcaaggcaccgagtttctgcgcctcttccagcactctggcggcaatcggctgatgaaactccacaatcaataccttcgactgtgcattggcaatgacggcgcttttcacttccgccaccgcgccgccgttaagcaaagccagcaaccgttcagatacccccgcctgcaccgcgtgcatcactggcgcgagcaccagaccacgcaacacctctaatgcctgcgccccctgaatctgactgccgccggaatagagcgtggcgcgaatccggctaataacatcggcatcgcctaccaccgcaccaacgccctctggcccaaacagcttgaagcaggaaaatgtcgacacattcgccccgcattcgcagccgattcgcgctaccttcatcaccgcatagttgtcatcggttaacgctggaacacctgccgcgcgcaacgttgccagcacgtctgccagcacatagcggtcctgcggctgctggcgcgtatgctgcaccagcgcggcatcaggttgttgctcgtcaacaacctgcttcagtgccgacagatcattgaaatcagccgtaatgagcgttagccccatctgctcaataataacccgtgtcgtcgggtaaacaggcgcgtcatgcaccagaagacgctgccccgatttgagcaaagccgccagtgccgcacggatcgcgccagtacccgcgccctgtaccagcgccgcggcctgtgcgtgaaacgcgtcagccagcacctgttccacacgctgggtaatgcggggctgatttagccccggcgttaagcccaaatcaccgcaggtaagaaactcgcagccaggaaaatgacggcaaatcgtgtccaccagcgcaaactgcttttgctgcgcctcaataagcgtcaggctttgcagaggaaacgtcttcataggtgccttccttaagccggaacgaacaggccaagccagtaaagaacattcagcaggatgccggtgatcattactgctacgaccggtgccgccattttctgtaccggacggcccagggattcgttgaggaagtaaatggcaaccgcgatagagaatccggtatagcccgccattttgattgctgcaaagatcgaaccgaccagcaacgccacttccatcagcatattcatggcgttacggatgttatccgacgcattacgtaccgacgggtagcgccccaaccatttgccgatcgaacgaagcagcaagacttccgccgaaataaccactgcgcctaataccgctgcaaccatcggattcggcgagagatagcccaccgcataaacaaaggtaaagcccgcaactgcatacacaccggtggctaacgcggtggtggcaatcaacggcacaaaacccagcccgcgcataaattctgccagtgccgcctggttgattagtgtttgcgattgttccggcgttacgcctgcggagtacgctttctccagtgtgaagatcgacacttcactaccggcgaaaatcttcatgctggcaacggcagcaatcaatgcacccacgatggcgatatacggtaagtttttgataatccgtgatgtacgctcttcaaacaccgacataccgctggcatcgatatcattttcatcacgatggcgcaggtcatgagttattgcgatccccagcagcatcaccatgccaataaagatttcgatggattcagggttaagatgtgggaaatagcgcactaccaccacacgagtcatcagtaccaccacggcggcgatcagactttgcttccagccaaactggtagaaaatcgccaccaacgggaacagtgcaaaagctgaaaccaccggcgagcttaattcccccaggctacctaatacatccaccggtagcgcggtcagcagctggtttactggcaacagacaggtgaggatcaatattccccagatagcaccaagaccaaacgccatcaggctgtttatcgccagtacgccgaggatatcggtaggaagaaagagtaaccatgcgttgagcagcccggttttcagggtaaaagagatccccaccgaggccacaaaaccaatgctcagaccaaaagcgatactccccgcctcgcgacggttcatatagccttcaatcagttgtggcaggatcgggcggataccgtcatgaaaaacggccgccgagcgatgcgccagaagcgatgtcatacccgtcaggcacgccaccacgataatctgaatatacagatccatagtcgtgccttttatttcagatggttaatcagcatcggaatcgcgtgttcaacgtgctcaacggaaaggccaaacgccacttttccttcagcgatcattttggcgatatgttcgtctttcgctttaatgcccggcttggcaatggtgcaacttttgttatagccaatcaccgcgatagcaatcgacaaggccgcgcccgcaccggtattacacgcgccgatgtagtaatccagttgcccggatttcactttcattgccgcttccatgtcgttgtgaatgaaaacttcaaaacagccaggagccgtcgcttcaatggtttttttaatctgctcacgctgtaagcctgcaacgccaatctttttcatgagtctgtccttattggaaaaattgagagggattttcacgtaacatcacatccacatcggcctgactgaatcctgactggcgcaattgcggaataaaagtggtcaataaaaagtcatagccataaccaccgttggcttttaaatgagagcgccgcgtaatatccatcgacagcatgacgcggttcagcaacccacggtcacgtagcgcatggagcatcgcaatgcgcttttcgtccgggtagtaactgttcttgccgatggtgtcgaactgcacatacgcgccgagatcgatcatcttcaaaatgttgtcgagattgtctttcagatcgcagtggccgacggtgacgcgcgaaagatcaactccgtgggcttgcaacagagccagttgctccagccccatcgtgctgaacgacgtatgcgtggagatcgggcgtccggtctggttatgtgccagcgcggcggcaataaacaccttctcttccagcgacgtaatcttcccttcgctggagccgatctccgcgataattccggctttcaggtcagtgccatcgataccctgctcaatttcatcgaccatctcctgcgccagttcctgcacgctgcgggtcgccacatgttccgggaaaaacgcgtcctggtaataaccggtacaggccaccacgttgatcccggtttcgcgcattacatcgagcataaattgcgcattgcgccccatgtaacggttggtcatctcaatcacattacgcacgccccgggccatcaggtcgttcatctcctggcaaatgaacgcatactgatcaaggcggcagtccacgttgtttttaaagccggagagatcaatatgcagatgctcatgggccagggtgtaacccgtcggatcaaaactcatagggtgtctcctgcaaaccggagggaggaaagaaaagagcgaccattttgtggcggtggcgcgcggaaaaattcacatacggtagcccccacatcagaaagcgtggtgcgcacaccaagctgcgtagcgaccatcccttgctgataaaccagcactggcaccacttcgcgggtatggtggctgtgaccaatggtcggatcgttaccgtgatccgccatcacgaccaggcaatcatctggctgcatcgcctcaataagccgggcaaggttacggtcaacgacctgcaaacgttccgcataacgtgcgacgtcttctgcatgaccagcgaggtcggtttcctggatattggtacaaataaacgccgtcggataggtgttaaattcgttgagggtgatatccataatccgctggctatccaccaggttttgccagctcacgccataaggattgctgacgatatctgccaccttacccaccagcacggttggcacgcccgcttcatacagtttttgcggcacctgcactttttcatcaacaccgtagcccatatgtacgacctggaaaccgttgtcataggcgccagaacgcggcgcattgatgccaataaagcgcccttctttgctttctgcggcatcgaggatgcactggctgtcggttaacaggccaccaaatgtaatgacccgcccgacctgtacctgctcacgcacgatacgacccattttgattgcgtcgtcaaaagagatcacagagagattggcggtgatgttatagacctggcctaaatccgcctcgagattatcgccaatcgcaaccgcctgattgacccacagaaattgcagatcatcgccacgacgctcaacctgccagccagcggaaactaatgcctgctcaacacggtcaatcacatcacgaaagggcatccgcagcggcggtaatgggcgcgtacctaaaatctcctgatgccccataaaggtatcgccaccttcatgttgcagctctgccacgccccaggttgcggagtctgacggctgcatatcgccaggcgcataacccaatgcgttgattagccccagagtctccagcgttggtagctgcaaatgcggcaactggctcaggatgtgaccacaggtattcgccccggcatcctgcggacgcaccaacgtgacatctttcattgcccctacgccaaagctatcaatcaataacaccacaaatcgcgccatttacgcctccagagggttgcctaggctgtcataacgaccaactatttctggttcgccatggtgaataccggacaccaacaccacatcgctacgggtgataaaaatctgcgtgcgaaaacagagcaccactgcactgcttaccggatgctcgcctgccagcggcagggtgtagtcgatactgctgtcatccacggcgttgagatatgtttcagtaattctttgattttctggcgtaaacaccagcgcatgttgcgcgtgaccacgacggtagtaaccgccgccgtagcagtagctgtcgccacggaaatgatgggagatttcacttaaccagagcatcgcgatacgttcaggctgatcgccctgttgatttgccggaatagtgcccgtcagcgcatgaccgggttcggtatgagtcacaccgtattccgccagcaatggcagcgacgtgcagctggtcgctgaaggtgcgttcagttgctcaatcgcaataccagatttcgccagttgatcccgtgcttgtaccagcgtgtgaagattcggtgtcggcaaaactttcccggcagcctcatcccaaagcaggcaagggaaatgggtaagtcccgccaaatgtagccccggcagattctggatttcagcaaccacctcgtgcagcgaatgctgtacaaaaccgctctcctgccccggataaagaaaatcatcgtcgctataaactttgagcagcacagactgcacacgtccggtcttcaccgctgccgcagaaatttcccgcgctttgtcgagggtaaacacagtgatgacgtcggttccctgttcaacggcgtcagaaacctgatgacaagggatttgtaccagatgcccctgatgcgctaccggcaaaccggcgcggcgcatgactcgcgcctctttgtaatccaccgccacaatgccgctgtagcccagagccagcagtttttctgccagccacggattacgaccgaattgtttggtcatcagatacagttcaatgccgtaaagccgcgccgtctcaatcagccgcttgccgttttccagaacttgatccacgtcgatcacccaactgtccggggcgatcttgccctgctgccacaaacttagtgcggcggaaatcagcgccggattctggcgtttcaatgcttctacaaacatcttgttgcctcgtttctgttccttgaattaaatattcatttttttgaatatttaggttgtacgacgtggatttatcgggagcttcaaacctcttcgttagcagccatccataatccataaaggttggccagcaaatagccttcttcacacgggttaacttccagtgcaaattccttcaacaatacctgatgcaattgcacaacggcttgccagtggctggattgcgccagttccgccagcaattcgtcatccagcggctctatttcttcaccacggcgactgcgcatcagtgcactcgccatatgtgtcatcgccatcgttccttgctcactgcgcgccggtagatggcactctgtttccagtacattgacgacctgcatcatgcctttgcagatgtccttatcaataacgcctgcatcgcaaagcaggttgagtctggtttccatatcagatgcctttcgtttaataactgggttcctgttccccactgactactcgctgttgatgagcaagcagggcatgtttatcaacaactgcacgcagcagttgttgcattgggtaatcatcgactcgcgtcaggatcacggcttcggtggcctgtaaaaatcgcggatcgtctgtgagcggcgtcgcttctaatcccagcatggtcagttcgttttccgccactacgttccagataaccgcgtcaacatcgcctttaacaatgcgttgtaaactctcgtgataagagagatcgactcgttccacatcactatcgccaaaaaagacatcggtcatgattttctgatctgccgaacggttatccagccccacgcgcttcacgtttgcggactcgcctttacggcaaatcaactggtgctcgccaacgtaggtatgcggtcccaactccagcgcgaggcataatcctttttgcgtgagataactttccgccgccagtcgcgaaaccaccgccatgtcatacacgccgttaagtaaacactccacgcgaatatccgcgccgcgcatatgcgcatagtaaaaaggaatgccatcaaactgggctttcaatccgctcgccaggccttcgtacaaacgggtatagggcaagggcatcgcacataccacgttgttgatatccacatgagtcagcaatgctttgttatccatctcgaccagataactgccattgcgcccacggcgttcaatccgtatcgctccgcttgattccagcgttttcaacgcggcctgcgtcaggccaaccgatgaacggcattcagttgccagctcatctatggttttcagtcgattaccgcacttttcacccaacaaataacgggccagtgtcgtgataacgacgccttcttttttgataaacgttcgacggcataatatattttcaataaaatgaatgtttatatcttcaggaatttgaagataaggcgcaacagcgagatgtggaaacggcgaggcgcttcacattttttcggattattgcaaatgaggataaaaaaaccgggtttccccggtttttggcattaatgttaaattacggcttcgccacaaaaccaatcgcttcgtacaccgcttttagcgtacgggaagcgtgtgcgctggctttttctgcgccgtctttcatcacctgttgcaggaaggcttcatcgttgcggaaacggtggtaacgttcctgcaattcagtcagcataccggaaacggcatcagccacttcacctttcagatgaccatacatcttgccttcgaactgtttttccagttccgggatgctctggcccgttaccgcagaaaggatatccagcaggttggaaacgcccgctttgttctgcacatcgtagcgaactaccggcggctcgtcggagtcagtgaccgcgcgtttgattttcttcactaccgatttcggatcttccagcaggccgataacgttattgcggttatcgtcagacttggacatcttcttggtcggctccagcagcgacattacgcgcgcgccagatttcggaataaacggctctggcaccttaaagatatcgccgtacagcgcgttgaaacgctgggcgatatcgcggctcagttccaggtgctgtttctggtcttcacccaccggcaccagattagtttgatacagcaggatgtccgctgccatcagcaccggatagtcaaacagaccagcgttgatgttctcggcataacgcgcagatttatctttaaactgtgtcatgcggctcagttcgccgaagtaggtatagcagttcaatgcccagcctaactgcgcatgttccggcacgtgggactgaacaaaaatggtgcttttctcaggatcgataccacaagccagatacaacgccagcgtatccagcgtcgctttacgcagcttctgtgcatcctggcgcacggtgatcgcgtgttggtcaacgatacagtaaatgcaatggtagtcatcctgcatgtttacccactgacgcagcgcacccatgtagttaccaatggtcaattcacctgagggctgtgcgccactaaaaacgatgggcttagtcatttttcgattcctgattttcgctatgcggaagccctaatgcgggcagaaggtcatttagagactgataaattacatcaggctggctgagatcgatagcctcgccgtagttatatccgtaggttaagccaactgatgggcaacctgccgcttttgccgcctgaatatcattgcgtgagtcgccgacaaacagcatctgttgtggagcaatgcccatccgctcagccaccagtagcagcgggtccgggtgcggttttttattttgcacatcatcaccaccaatcaccacgctgaagtatttggcgatatctaaggcttcgagcagcggcgcgacgaacggcgtcggtttgttggtgaccaggcctagcggcaggcctttagcctgcaacgcgcccaacgtatcggcaacgtgcgggaacaaaaacgtcccctcttcggcaacctcgccatagtagcgatcgaacagtttacgcaggatacgtacctgttcttctgccggaatgtcgtcatcaacgggcggtttacccattgttttacgcagagtcgcacgttcctgacgcgcccaggtcaatgcgcgctccatcagaatatctgcgccgttaccaatccaggtaataacgcgttcttcacctgcgacaggcaactccagcgcatacagcgccatatctaccgcagcagcaagaccgggtgcactgtcaaccagcgtaccgtcgagatcaaaagcgacgccgcgaatatcttcaaacttattcatgacttacctttgccagttcactgcgcatttcatcaatgacttttttgtagtctggctggtcgaagattgccgaaccagcaacaaacatatccgcgcccgccgcagcgatttcgccaatgttgttcaccttcacgccaccgtccacttccagtcgaatgtcaaagccagactcgtcgatacgacgacgtacttcgcgcagtttatccagtgtttgaggaatgaaagactgaccgccgaaaccaggattgacggacatcagcaggatcacatccagcttatccatcacgtaatccagataactcagaggtgtcgccgggttaaataccaaacccgctttacagccattttctttaatcagttgcagcgtgcggtcaacatgctcggaggcttctggatgaaaggtaatgatgctggcaccagcggcagcgaaatcaggcacaatgcgatcgacgggtttcaccatcagatgtacgtcgataggggcggtaatgccgtagttacgcaaggatttcagcaccattggcccaatcgtcagattgggaacatagtggttatccatgacgtcaaaatgcacgacatcagcgccagctgccagggcttttgcggtatcttcacccaggcgggcaaaatcagccgacagaattgagggggcaatcaaatactgtttcatccgcttctccttgagaattattttttcgcgggtgaaacgactcctggtttgtacaaagccagcagttcgtccacctttttacgtgtgccgccgttgctgcttatactgcgtcgaactttgacgacatgcaattttgcgcgctgataccactcacgcgttaacatcgtatcgtgattggagatcagcaccggaatatggcgatcaaccagaccttcagcgatctccgccagatgcgcttgttgttcaagcgtaaaactgtttgtgtgatacgccgtaaagttggcagtcgcagacagcggcgcataaggcggatcgcaatagacgacagatgcatcatctgcgcgcgccatgctatcggcgtaagactcacaatagaaaaaggcattctgcgctttttcagcgaagtgatacaactctgcttccgggaaatagggttttttgtagcggccaaacggcacgttaaactcaccgcgcagattgtaacgacacaggccgttgtaaccgtagcggttcaaatataaaaacagtaccgcccgacggaacggatcctggcttttgttgaactcttcgcggaactgatagtaaacctcagcgcaatttgtttcgggaacaaacagctcgcgtgcggcctgtacgtactcatcagtacgcatcttcacaatgttatagagactgatcaggtcgctattgatatcggcaaggatataacgagaaaagtcggtgttgagaaacaccgacccggcacctacaaaaggctcaaccagacattcgcccttgggcaaatgccgtttaatatcatcaagcaggggatacttgccccctgcccacttcaaaaaagcgcgatttttcttcatgctgactaactaattacaccttctccggctgtggagaaagctccgacagcatccagcgcttcaggcaacgcccgcaatgataaaccattgcgggagataaccttgattacttcaggtcggcctgtacctgacgcagcggtttcgcccacgggtttttggcctggacatctgctggcaatgtagataccgcttttttcgcctcttctttcgaagcatacacgccagaaaccaggacataccacggctgaccattacgcgtcgtttcatagacaacgtagtttttcagattctctttcttcgcccaaccgttcaggttgtcgtagttagaggaactgctcagctgcagagtgtaatggctggacggtgccgatttcaacgaaccaacattacctgcggtcttccctccagcggctggtgttgccgtggtttgcgccggggatgccgtctgtactggagccgtagtcgccgtctcttttggtgctggcgtagaagtcgcagccggtgcctttgtgctcgccacaggggcagctggttcagttcgcttcggcgtctgtgcgactggcttcggttccgttttcacggttgcttgcggttttttcggttcaatcaccgcctgctgacgagccgggcgcgtagtggccggacgttcagcggtttgcgttttcgccgtgtcacgcgatgcattgccattgcgaacaggcgcgacagtcgcgggttcagtcggcaatgtagaattgaccgccacattgttcaactgttgctgattttgtggctgggtcagcgcattgttcaggtcaccctgcacttcaacacgttgttgaccatccgttgccgccggggtttgcccttgagtcggcgtagaagagatcggcggcagagaaacatcctgctgagtattttccgcagacgtggttcccggcgctggctgcacgccattggcctgatcggtcgcattgcctgcaagatcaatactcttctcgccagacgcggtttgatcgctggaagaggtcgagggggcttttagcgcagaaccgataccgatgatcaacagcagtagaaccagaatgccgacacccatcatcatatactgacgagaagcgggtttactggctgcttttttgcgcttacgcggacgacgctctacgcgctcttcatccacggtttcatcttcggattcgtcaatttcttcttcgatttccggttcctcattacgcgctttttgcgcacgagtcggacggcgatcgtcagtgtcatcaagttcaatatcatcaaaattgatctgcggttcgccacgttcagtacgctcagaacgttcagaagattgacgagaacgaccagtacgacgatcgctgggatcgggtttcagctcgtcttctggtttgaattcatccatttaacaccccactaaaaggttaatgcttaccacgttgcaattaacctgaagctaatagaccgcttgataagcggcctgacctttcttgttgttacgctgattgacaatcggcaatggcgttaagaacaagctcgtgcgaaacgccgctgcaaacttcactcttaccaattgccaacggaagaattaagcgcatctctcccgcaaggactttcttgtcacgcagcatatgcggtaaatacgcctgcgcggacatttcgcgcggcccattgaccggtaacccagcccgcgtgagcagggttataatacgctgcgtttcggcagaactaaactgcccgagacgttccgacgtccgcgccgccatcaccatacccgcagcgaccgcttcaccatgtaaccaattgccataccccatttcagcttcaatggcatgaccaaaggtgtgtcccagattcagtaaagcacgtaacccggtttcgcgctcgtcggcggcgacaacttctgctttcagctcacaacaacggcgaatacagtacgccattgccggaccgtccagacgcaacaacgcatccagattctcttccagccagttaaaaaacgcaccgtcaagaataatgccgtatttgatgacttctgccagccccgacgctaactcacgcgggggaagcgttttcagacagtcgagatccaccaccactgaagcgggctggtagaacgcgccaatcatgtttttaccgaggggatggttgaccgcagttttgccgccaacggaggagtcgacctgcgacagtaacgtcgtcgggacttgaatgaaacgtacaccgcgctgataactcgccgccgcgaagccggtcagatcacccactacgccgccgccaagcgccaccagagtagtatcgcgaccatgcggcttttgtaacaatgccgtaaagacggtatcgagtacagccaggcttttatactgctcgccgtcagggaggataacgctatcgacgttaacacccgcctgttcaagtacgccgcggaccttatcgagatacagaggagccagggtttcgttggtgaccaacatgacctgctcgcccgatttcagcggtaagaatgaagctggttcattaaacaaaccagatgcgatggtaattgggtaactacgttccccgagagtaacgacaatcctctccataacgcgacatccaccttaattactgtacccgcagacgagtgtatataaagccagaattagttgctttccagcatgtgaataatctggtttgcaaccactttagcgctttgatcatcagtacgaatggtcacgtcggcaatctcttcatacagcggattgcgttcattggccaacgcttccagaacttcacgcggcggtgtttcaacgtgcagcaacgggcgttttttatcacgctgcgtgcgtgcaagttgcttttcgatggtcgtttcaagataaacgacaacgccacgagcggaaagacggttacgcgtttcacgggatttcacagagccgccgccagtagccagcacaataccctgtttctcggtcaactcattgatgaccttttcttcgcgatcgcggaagccttcttcgccttctaaatcgaaaacccagcccacatcagctccggttcgtttctcaatctcttgatcggaatcgtaaaattccatattgagttgttgagctaactggcgcccaatagtgctttttccggcacccataggcccaaccagaaagatattgcgtttctctgccattttttcggtactactaagactattcgttaatgataaacccgcttcgctcagagagcgccgcaggacatgaactgaaacctcataagatattgcgagagtcagactgaaaattatctcaatactccagcgggtttggcaactgaataaatcacccatccctctgcatatctggtcgctgcaagcgcgctgccttgctaccaccgctctggcgataaatcaccgggtaagattagcgtaaaaaagacagcaaaatgccgcctgaatgataaatcatcatcatggaacgcaggcagcgaagagcaccaactctcaaatcggtactccttgtatgctaaatacctgcgcgcgtcaaatagatgaaacacgttcagtgtaaaaacattaccgcttttacggctgtttactcactggaaaccagtcgtggcgtgataaacaccactaactcgcgtcgttcatcttcttttccgtcatgacgaaataattgcccgaaccagggaatgtcgccaagcaacggtacgctatcctgacccgatttatttttacgggtaaaaatgccgcccagcgccaacgtttctccgcttttgacctcgacctgcgtttcgatctcctgcttatcaatcgccagcacttcgccatctgcctgctgtagcacctgccccggaacgttctggctgatgtgtaatttcagccggatgcgacctttttgtaacaccgtgggcgtgacttccatccccaggacggcctctttaaattccaccgacgtcgcgccactttccccgctggaaacctgatatggaatttcgctcccctgtttaatgctggcaggctgaagatgtgaggccagcagacgcggactggcgataatatccagctgctgtttttgttcgagcgcggaaagctcaagatccagtaaacgtccgttgatgcgtccaatgttaaaaccgatatgcgttgtcgccgtcgctacggagaggtcgctgccaagcgtggtgacttgcccaacgccaccagcttgttgcgcatcggccagcgtccatttcacacctaactcacgcaaacttttttcattaatggtgacaatatgcgccgagagctcaacctgcccgaccggcagatccatttgcgatacccactgttcaagcgtgcttaacgccgttttgttatctcgcagcaaaaggcgattggtgcgtttatcgacggtcatactccctttggcactcagtagcttctcccccgctttcgccagctctccggcgtcggcgtattgcagagtaatattgcgattttccagcggcagatttgcctgcgcccgcgcctgctccgcctcctggcgggcgatattgtcattctgccaggcaacggaatgcaccgagagaatattgccttcctgccgcgttatcagtccggcgcttttcactacagtttgtagtgcctgcttccagggaacatctgttagatgtaacgacaccgtaccgctgacgtctggcgaaaccaccaggttcaacttctcctgttcagccagcgcctgcaacacctgagctaccggaacgtcatccaccatcagcgtcactttttgcggctttgccgcctgtacgccgggtatcagcatcaacagtagtgcggctatccattgcttcatttgtatctccttgccgttgccacaaccagtgtggcggttcgcagtttgttccggttcccagcgttagtgcgtctggcgtcagctgtaaaattgtccagccgttttccagcacatcgttttgctgcacccgtcgccatttcttttgcccgtcttttattacaccgatgatgcgctcgcctcgcgctaccatcccctgatagcgccactggctaagttcgctaatccggcatagatcttccggcggtttaaaagggtcacgcataccggttaaaaggcacaatgcaatacctgccaacaaccagcgtttaaccctcatgcggtgtctccagttgtagcgtgaacaaaaggtcatcaccttccacgcttaacgaaaaacggctcacgctgacgttgcgctctgccagccgtgtaaatgccgacggcactgcttcccacagcgttttcaacgccaactcgcctccctgcgcggatggatgccagaaaaccagttgtgcgccgggcaactgaaaatccagtggcgaaaagggcagcgttttttcttcgctgaagggagtggtgtcaaccaggcgatacagtgcagcccactgctggtggtgactcgcccgtagtcgaattaatgcgtcgcgctcttcatggtgtgtcaatgacagaaaaatgagcgtaactaacaccagcaaccagactgcccagcaaaactggcggaggcggagtgatgtggcgaaccaccagtcaaagaacatgttcatcgctaaccttccttgttaactgatactcaaattgccagcgtccctgcgcatcctgctgcgtggcccccctctgattgagatgaaaagaagcatcctggcggagtgacgtttccagcgcgtttaacgcggcaatgcttgttgtcagccccttgatctccagcgttccctgctgccagcttatcgttgtcagccaggaatgttcgggtaaaagcgccgccagtgcttccagcgcagattgccagtcgcgggtaaattgtcgctggcgctgcctttgcaaacgctgttcgcgtaactgctggcgttccagcaaacgtggtttcgttatctgtaagctgcgggcgagttgttgttccgcctgaagcaaaacggcgtttacgcgtgcttcggcattgcttgtcagacgcagtattagcgttatcccgacggccagcagcagaggcgcaacgaacatcagcaaccagaaacgaagaaaagcagtccggcgttgctgtcgccagggcaaaaaattaattggcgggttcatcagtacaccttcccaagcgccagccccagcgcgatggcaaagtctccacctggtggcggtagcggcggctgacgaacagaaaccgcctcccaggggtcaaatccgccttcgccacatagcgcgacgctttcgggatcaacagataacgctgccgccagctccttcgcgctagtcatccccaccgccagtttgcgcccccagctatagcgcgtcgcccacagccactgttcgttatcacgccaggccagacattgctgatgagaaggtaaaaaaggcaggaatcgctgtaatgcactggcatccggagtgatcgcgctaacatgaacacgcaacctttctgccagagtaagcagcgttgccagctctttgctttgcgcggcagtcacgttataggcgggactgagtgagtcttcgctgtaatcgaagcgcagggagtccggatccatatccagttcacgggccatcgtcccggacagccaggccatttgctcccgctcaccgagggacatcgacgggcgtggaaatgaccgctgtaatgtgcgactggcgggaaacgccaacataatgtgatgacgctgcggcagttcacgactccacggtaacaacgtgttagccagccgctgcacatcaacaatccgcccatctttgataatgtcgttctccagtggcaaccgccaccagcggtgcaataagcattcttttgcgctccgcacgatagcaaccgctaccgcttcttgctgttgtaaatgcaaaccaatttgccagttcttaaatgccattgtgatgatctccttatcacccgtcactctgacgggtatatcaatgcgtctggcttgcctttatactaccgcgcgtttgtttataaactgcccaaatgaaactaaatgggaaatttccagtgaagttcgtaaagtattttttgatccttgcagtctgttgcattctgctgggagcaggctcgatttatggcctataccgctacatcgagccacaactgccggatgtggcgacattaaaagatgttcgcctgcaaattccgatgcagatttacagcgccgatggcgagctgattgctcaatacggtgagaaacgtcgtattccggttacgttggatcaaatcccgccggagatggttaaagcctttatcgcgacggaagacagccgcttctacgagcatcacggcgttgacccggtggggatcttccgtgcggcaagcgtggcgctgttctccggtcacgcgtcacaaggggcgagtaccattacccagcagctggcgagaaacttcttcctcagtccagaacgcacactgatgcgcaagattaaggaagtcttcctcgcgattcgcattgaacagttgctgacgaaagacgagatcctcgagctttatctgaacaagatttacctcggttaccgcgcctatggtgtcggtgctgcggcacaagtctatttcggtaaaactgtcgaccaactgacgttgaacgaaatggcggtgatagccgggctgccgaaagcgccttccaccttcaacccgctctactcaatggatcgtgccgtcgcacggcgtaacgtcgtgctgtcgcggatgctggatgaagggtatatcacccaacaacagttcgatcagacacgcactgaggcgattaccgctaactatcacgcgccggagattgctttctctgcgccatacctgagtgaaatggtgcgccaggagatgtataaccgttatggcgaaagtgcctatgaagacggttatcgcatttacaccaccatcacccgcaaagtgcagcaggccgcacagcaggcggtacgtaataacgtgctggactacgacatgcgccacggctatcgcggcccggcaaatgtgctgtggaaagtgggcgaatcggcgtgggacaacaacaaaattaccgatacgctgaaggcgctgccgacctatggtccgctgctgcctgccgcagtcaccagcgccaatcctcaggaagcaacagcgatgctggcagacgggtcgaccgtcgtattgagtatggaaggtgttcgctgggcgcgcccttaccgttcggatactcagcagggaccgacgccgcgtaaagtgaccgatgttctgcaaacgggtcagcaaatctgggttcgtcaagttggcgatgcatggtggctggcacaagtgccggaagtgaactcggcgctggtgtcgatcaatccgcaaaacggtgccgttatggcgctggtcggtggctttgatttcaatcagagcaagtttaaccgcgccacccaggcactgcgtcaggtgggttccaacatcaaaccgttcctctacaccgcggcgatggataaaggtctgacgctggcaagtatgttgaacgatgtgccaatttcccgctgggatgcaggtgccggttctgactggcaaccgaagaactcaccaccgcaatatgccggtccaattcgcttacgtcaggggctgggtcagtcgaaaaacgtggtgatggtacgcgcaatgcgggcgatgggcgtcgactacgctgcagaatatctgcaacgcttcggcttcccggcacaaaacattgtccacaccgaatcgctggcgctgggttcagcgtccttcaccccaatgcaggtggcgcgcggctacgcggtcatggcgaacggcggcttcctggtggacccgtggtttatcagcaaaattgaaaacgatcagggcggcgtgattttcgaagcgaaaccgaaagtagcctgcccggaatgcgatattccggtgatttacggtgatacgcagaaatcgaacgtgctggaaaataacgatgttgaagatgtcgctatctcccgcgagcagcagaatgtttctgtaccaatgccgcagctggagcaggcaaatcaggcgttagtggcgaagactggcgcgcaggagtacgcaccgcacgtcatcaacacaccgctggcattcctgattaagagtgccttgaacaccaatatttttggtgaaccaggctggcagggtactggctggcgagcaggtcgtgatttacaacggcatgatataggcggaaaaacgggtaccactaacagttcgaaagatgcgtggttctcgggttacggtccgggcgttgtgacctcggtctggattggctttgatgatcaccgtcgtaatctcggtcatacaacggcttccggagcgattaaagatcagatctcaggttacgaaggcggtgccaagagtgcccagcctgcatgggacgcttatatgaaagccgttcttgaaggtgtgccggaacagccgctgacgccgccaccgggtattgtgacggtgaatatcgatcgcagcaccgggcaattagctaatggtggcaacagccgcgaagagtatttcatcgaaggtacgcagccgacacaacaggcggtgcacgaggtgggaacgaccattatcgataatggcgaggcacaggaattgttctgattaaaaaggcgcttcggcgcctttttcagtttgctgacaaagtgcacttgtttatgccagatgcgggtgaacgcgttatccggccaacaaaaaattgaaaattcaataaattgcaggaacttcgtaagcctgataagcgttgtgcatcaggcaaacttcacgcatttacactcgcccctgccctttcaaccattcgcgcacgaggaacagcgcgctgacattacgcgcttcgttgaagtcaggggcttccagcaaatccatcatatgcgccagcggccagcgcacctgtggtagcggctctggctcatcgccttccagtgattccgggtagagatcttgcgctaccacgatattcattttgctggaaaagtaagacggtgccatgctgagcttcttcaaaaaagtcagatcgttcgcaccaaatccaacctcttcttttagctcgcggttagcggcttcaaagacgctttcacccggatcaattaatcctttcgaaaaacctaattcgtaggattcagttcccactgcgtattcgcggatcaggatcaggtgatcgtccacaatcggcacaatcatcactgcttcccggttggttggacgcattcgttcataaacacgccgcacgccattgctgaactccagatccacgctttcgacggtaaacagtcgggaacgggctacagtttcaacattcagaatggtgggtttttgtaatgatttgctcatcgtgggatctatgctgtgaaatcagcggttattgtgcgatatcggacacgctttcggcaatgtgaattgcatgttatttacatttatgtaacttaataaataatcgtcctcaaatcaaattaaaagtcaataggttgaaataactccaggaatttgctgatattccgccttcagagggtttgctatgatcagcggttactgtgatgtgcttaatgatgctcaagttaaactccacgcttgccgatagccaaccgcagaatcatgtattgtgtccggtgcgactgaccacgcctgacagactaagtaagatggggaaagcatgagcaccattgtgatttttttagctgctttgctggcctgctcactacttgcgggatggctgataaaagtgcgatccagacggcgtcagctgccctggaccaacgccttcgtggatgcgcaaacgcgtaaactcacatctgaagaacgtagcgccgttgaaaattatcttgagagcctgacgcaggtattacaggtgcctggcccaacgggagccagcgcggcaccgatctctctggcgctgaatgccgaaagcaacaacgtcatgatgctgacacacgctatcacgcgttatggcatctctaccgacgatccgaataaatggcgttactacctcgattcggtagaagtccacctgccgcctttctgggaacagtacatcaacgatgagaataccgttgaactgattcataccgattcgctgccgctggttatttcactcaacggtcatacgctgcaggagtacatgcaggaaattcgcggctatgctttgcaacctgttccgtcaacgcaggcgtcgattcgcggggaagagagcgagcaaatagagctgctcaatattcgcaaagaaacgcacgaagagtatgcgctgagtcgtccgcgcgggctgcgcgaagcgttgctgattgtcgcctccttcatgatgttctttttctgcctgattaccccggatgtctttgttccgtggctggcaggcggcgcgttactgctgctgggagcaggtctgtgggggctattcgcgcccccggcaaaatcctccctgcgggaaattcattgtctgcgcggtacaccccgtcgttggggattgtttggcgaaaacgatcaggaacagatcaacaatatttcactcggtattatcgacctggtctatcccgcacactggcagccatacattgctcaggatcttggtcaacaaaccgatatcgatatctatctcgaccgccacgtagtgcgtcaggggcgatatctttcgctgcatgatgaagtaaaaaactttccgttacagcactggctgcgcagtacgattattgctgcgggctcgctattggtgctgtttatgctgttattctggatcccgctggatatgccgctgaaattcaccctctcgtggatgaaaggcgcgcagaccattgaagccactagcgtaaaacaactggctgacgctggcgtgcgggttggcgatacattgcgtattagcggtacgggaatgtgtaatattcgcacttccggtacctggagcgcgaaaaccaattcaccttttttaccatttgactgctcgcagatcatctggaacgacgcccgctcattgccattaccagaatctgaactggtcaacaaagcgacggcattgaccgaagcagttaatcgccagctgcaccctaaaccggaagatgaatctcgcgtcagtgcctcattacgttcagcaattcaaaaatccggtatggtattgcttgatgattttggcgacattgttctgaagacagcagatctgtgttctgccaaagatgactgtgtgcgactgaaaaatgcgctggtcaatctcggcaacagtaaagactgggacgcgctggtaaaacgcgccaacgccgggaaactcgatggcgtgaatgtgttattacgcccggtgagtgcggaatcgctggataacctggtggccacctctaccgcgccgtttatcacgcatgaaacggcgcgagcggcacaatcactaaacagtccggcccccggcggattcctgattgtcagcgacgaaggcagcgattttgttgatcagccctggccttcggcatcactttacgactatccgccgcaagaacagtggaacgctttccagaaactggcacaaatgctgatgcatacgccgtttaacgccgaaggtatcgtcacaaaaatcttcactgacgccaatggtacgcagcatattggccttcatccgatcccggatcgttccggcctgtggcgctatctcagcaccacgctgctgctactgacgatgctgggtagcgccatttataatggcgtacaggcctggcgtcgttaccagcgccatcgtactcgcatgatgaagattcaggcctattatgaaagctgcctgaacccgcagctgatcaccccttcagaaagccttatcgaataacacgtttgcgcggcaggttatgctaccctgtcgcgcaaattgcttcactctggagatttccctcatgcatatcaacattgcctggcaggacgtagataccgttctgctggatatggacggcacgttgctcgacctcgccttcgataactatttctggcaaaagctggtgcctgaaacatggggcgcgaaaaacggagttacgccacaggaagcgatggaatatatgcgccagcaatatcacgacgtacagcatacgctaaactggtactgtcttgattactggagtgagcaactgggtctggatatctgtgcgatgaccaccgagatgggaccgcgtgccgtactgcgtgaagataccattccgtttcttgaggcactgaaagccagcggtaaacagcgaattttgctcaccaatgcgcatccgcacaacctggcggtaaaacttgagcataccggtctggacgcacaccttgatttattactttccacccacacatttggttatccgaaagaggatcagcggttatggcatgcggtggccgaagctacggatcttaaagctgaaagaacgctgtttattgatgacagcgaagcgattctcgatgctgccgcgcaatttggtattcgttactgcctcggtgtgactaatcctgactccgggattgccgagaaacagtatcaacgccatccgtcactgaatgactaccgccgcctgatcccctcgctaatgtgaaggagatgccatgaaagaaaaacctgctgttgaggttcgactggataaatggctatgggctgcccgtttttataaaacccgcgcgctggcccgtgaaatgattgaaggcggtaaggtgcattacaacgggcagcgcagcaagccaagcaaaatcgtcgagctgaatgccacgctcactctgcgccagggaaatgacgaacgcacggtgattgtaaaggcgattactgaacagcgtcgccccgccagcgaggcagccttgctgtatgaagagactgcggaaagtgtagagaaacgcgaaaaaatggcgctggcacgtaaacttaatgccttaaccatgccgcatccggaccgacgcccggacaaaaaagagcgccgcgacctgttacgatttaaacacggcgacagtgaataactgtcacctgcaagagagatgattatgccgcaacatgaccaattacatcgctatctgtttgaaaactttgccgttcgcggcgaactggtaaccgtttcggaaaccctgcaacagatccttgagaatcacgattatccgcagcccgttaagaacgtgctggcagaactgctggttgcgaccagcctgttaaccgctacgttgaagtttgatggtgatatcaccgtacagctgcaaggcgacggtccgatgaatctggcggttattaacggtaacaacaaccagcagatgcgcggtgtggcgcgcgtgcagggcgaaattccagaaaatgccgacctgaaaacgctggtcggcaatggttacgtggtgatcaccatcaccccgagcgaaggcgaacgctatcagggcgtggttggtctggaaggtgataccctggctgcctgcctggaagattactttatgcgttctgaacagctgccgacgcgcctgtttattcgcaccggcgacgtagacggcaaaccggctgcaggcggaatgttgttgcaggtaatgcctgcgcaaaatgcccagcaggacgactttgaccacctggcgacgctaaccgaaaccatcaaaaccgaagaactgctgactttaccggcaaacgaagtgttgtggcgtttgtatcacgaagaagaggtgacggtttacgatccgcaggatgtggagttcaaatgcacctgctcgcgtgaacgttgcgccgatgcgctgaaaacgctgcctgatgaagaagtcgatagcatcctggcggaagatggcgaaattgacatgcattgtgattactgcggtaaccactatctgttcaatgcgatggatattgccgagatccgcaacaacgcgtctccggcagatccgcaagttcattaatgagtatgtccggcagagaggactctgccggattttacgacgtaatggcctgatgcgcttatcagacctacggattcaatgcaatttatcgcaggtaagataatgtgccgaatccaataaaaatcagatatgcgctgtcattcattcagattcaaatccagtctttcgccatccaccgtaagatcgcgccacactttaggcttcgtccccagttttccatcctccgcagccatgagtaatttttctttcgttattacagccgggagtgaattcatcgtaatctctttccattctttcccagcaggatcaataccatagacaatgtatctttcatcattaaaggcaaacaggatccgctctgccctgccatcactattcagatcttgctctaccagcacgcaggcatctttttcaatgcatatcattgcgttatagcgatttttcatcactgccgaccagaatatcgtatccggttttccagaacctgaggcaataaatacattatctgctaatgctttttccgatatctgctgctgaagacgttgtactccatcaaaagccatcagcagaccccgcctgcgtttcgggtctttcatatactcggcatcgcttttcagcgactcaagcgccgcacgtccatagcgaccgctctgttcgagcatatagagacttacctggtctggcgtgtttttgccgctctgataacgcgccatatgactgttcacgctaatgcgcatactgtccagcaccggagaattaagaagcaccagtattaccaacaccaataacgaaaccgcaaggttcactttgccctgaagaacaagggggttttgccctttacgccagacgatactgacaaaataccccagcgaccataccagtaacaccagcaccgccagcgcgccctgcaagcggtcgacagtccagccgtactgagcgacccgcatccataacgcccaggcggcgacgaacacatacagcggagcaaccagcaaagcggttttaatcaggcaacgcaacggccccgtccagggaagtgacgctttttgcggatcgcggacaatagccattaagatcaattgcaaaaaggccagcgtcaacagcaacccggcggcggaaatgtggcgagaaatcgcgctcaggcccgtaaacggcagggtgatgataaacatcagggttagcaatgatactaacggcagcaaccccgtggcgattaacgtgaacaacttttgaatagagtcgattaaacgtgactgtgtacgcgcgaggatcaccgccagtgcggtaaccagacctaacgtgagataaataaacccgtcggttgcaaaaaagagcgttttgaaaaacgtgatgccaacaagtttaaacaactctccccacagtaaaagtaccagccacgtcaggccattggcgagaaaaatcaccagtaatataagtacgttatgccatactgactggtaaaaatagcgatagcggctactgtcattgcggatgcgaaggctttgttgtatccacggtagcaacaacattgccatcagcagcagatagcagccaaaatcccaaagcgccttttctgctctccagtggttcatgccatcaatttgccactttagccaaccgctcattcccagcgtggcaataaacaccagcgccagccatccccaaaggcgcttctgtttaaaggagatcacggagaagagtaaaacggatgaaaacgcgacggtcgcaggcacgccataaacaatccaactgtgattttttccggcaagccaggcgatcagcaggtagcaaaccagcccctgaagtaatccggtagcaatcatcccccagcgtgttgccggtgaaagttcaacgttatccatgttggttatccagaatcaaaaggtgggttaattatcgcatccgggcagtagtattttgcttttttcagaaaataatcaaaaaaagttagcgtggtgaatcgatactttaccgattgaatttgcatcaatttcattcatgaatgcgattccactcacaatattcccgccatataaaccaagttttaaccttttgagaacattttccacacctaaaatgctatttctgcgataatagcaaccgtttcgtgacaggaatcacggagttttttgtcaaatatgaatttctccagatacgtaaatctatgagccttgtcgcggttaacacccccaaaaagactttactattcaggcaatacatattggctaaggagcagtgaaatgcgcgttaacaatggtttgaccccgcaagaactcgaggcttatggtatcagtgacgtacatgatatcgtttacaacccaagctacgatctgctgtaccaggaagagctggacccgagcctgaccggttatgagcgcggggtgttaactaatctgggtgccgttgccgtcgataccgggatcttcaccggtcgttcaccgaaagataagtatatcgttcgtgacgataccactcgcgatactttctggtgggcagacaaaggcaaaggtaagaacgacaacaaacctctctctccggaaacctggcagcatctgaaaggcctggtgaccaggcagctttccggcaaacgtctgttcgttgtcgacgccttctgtggtgcgaacccggatactcgtctttccgtccgtttcatcaccgaagtggcctggcaggcgcattttgtcaaaaacatgtttattcgcccgagcgatgaagagctggcaggtttcaaaccagactttatcgttatgaacggcgcgaagtgcactaacccgcagtggaaagaacagggtctgaactccgaaaacttcgtggcgtttaacctgaccgagcgcatgcagctgattggcggcacctggtacggcggcgaaatgaagaaagggatgttctcgatgatgaactacctgctgccgctgaaaggtatcgcttctatgcactgctccgccaacgttggcgagaaaggcgatgttgcggtgttcttcggcctttccggcaccggtaaaaccaccctttccaccgacccgaaacgccgcctgattggcgatgacgagcacggctgggatgatgacggtgtgtttaacttcgaaggcggctgctacgcgaaaactatcaagctgtcgaaagaagcggaacctgaaatctacaacgctatccgtcgcgatgcgctgctggaaaacgtcaccgtgcgtgaagatggcacaatcgactttgatgatggttcaaaaaccgagaacacccgcgtttcttatccgatctatcacatcgataacatcgttaagccggtttccaaagcgggccacgcaacgaaagttatcttcctgacagcagacgcctttggtgtgctgccgccggtttctcgtctgactgccgatcaaacccagtaccacttcctctctggcttcaccgccaaactggccgggactgagcgtggcatcaccgaaccgacgccaaccttctccgcctgcttcggcgcggcgttcctgtcgctgcacccaactcagtacgcagaagtgctggtaaaacgtatgcaggcagcgggtgcgcaggcgtatctggttaacaccggctggaacggcactggcaaacgtatctccattaaagatacccgcgctattatcgacgccatcctcaacggttcgctggataacgcagaaaccttcactctgccgatgtttaacctggcgatcccaaccgaactgccgggcgtagacacgaagctcctcgatccgcgtaacacctacgcttctccggaacagtggcaggaaaaagccgaaacgctggcgaaactgtttatcgacaacttcgataaatacaccgacacccctgcgggtgccgcgctggtagcggctggtccgaagctgtaatcagctgatatctcattgaccccttatccaaacggataaggggtttttttatatctaattagctaccaatatgtacacttataattatcaatagaccgcaggatgcattatgttcacctttattgaactacaaggatttagcaaacgccgccagttattgctacctgataagtagttccgggcttttcaggaactactcattcaagatcccactgccggtgacattatcgcaggcacaggcagttttagaaaaattcgctggaaccgttctggaatggggaaacggggtggcattcgaataatttattacaacgtaacacgcaatggtcgaatttatctggcgttgatttatcctaaaaatgaacaggatgatttaacagaagaacaaagaaaggcattgaaactattgtccgagaagctgctttaatgttgaagctccacaaattccaccatggtcgaaatgccaacggagacattgaaaacagatgaaagatgaattatttgctgatcttcttgccagcgcagaagaaatggtacgcatcgaaaagggtgaagaaacgcctgaaccagagcacgtccatacttttagcgaaatcgatgtaaaagcgatccgtgaagcaacgggtttacgtcagcaagattttgctgtcgccgtaggggtaagttatgacctggtcaaaagctgggaaaccaaacgccgtcagcctaccggagcaccccgaaaattgctcctgcttttgcaagcgaatcctttcattatcaatcaattgaaaacaatctaaaaacgggaggcaccttcacctcccgtttttttacccttcttttgtcatgccctgcgcccgcgttaccggcactggcagccaggcgcgaatggaaagcccgccccgttcgctggtgccaagctccagcatcccgttatggttatccacgatacgctgcacaatcgccagccctaatcccgtgccgctaatagtgcgcgcactgtcgccacgaacaaacggctggaacaggtgcttacgctgttctggcgcaatacccggaccgtcatcttctacctgaaaccaggcgcgattcggctccgtgccgctgctgactttgatccagccattgccatagcgggcggcgttcaccaccatattcgctaccgcgcgtttgatcgacagcgggtgcattttcacctcaatgctaccggggtaaagcgcagtttcaatttcccgctcatagccactttcggcagcaataacctcaccgagtactgcgttgagatccgccatttccatcggcatctcctgcccggtgcgcaggtagtcgataaactgctcaatgatggcgttgcactcttcgatatctttattgatcgattctgccaggtagccatcctgctcgctcatcatctcggtcgccagacgaatacgcgtcagcggcgtgcgcagatcatggcttacccccgccatcagcagcgtgcggtcatccgccagttgcttaacaccagccgccatatggttaaaggcgcgggtaacggaacgcacctccgaagcgccatattcacgcagcggcggcggaataatccctttacccacctgcaaggctgcgtgttcgagatcgaccaacggtcggttctggatacgaataaacagccacgccccgcctatcgccaatagcataatcgccaacgtataacggaacagcggggagaaatcgccctgatgaatttcggttagcggcacgcgtacccagatattgggcgacaaccaggttttcagccagacgacaggcgaacttttgttgacctcgacgcgaacttccgtcggaccgcccagttgctgcgccatctgatggcttaagaattcatagtgttgcgcccaacgcagacctgcctcttcggcagcttcgttggaatagagagagatccccagctcacggtagatctcccgacggaaagcgggaggcacaaccaactgcgtgccgtcctccagttgcagtttgtcggtcatcaacatacgcacttcgtacgcgaggactttattaaactgctggaggctcggcaaaatcgcgaagttcagcaccaccagataagtcgtcaccaggctgacgaacagcaaggtgacgatgagcaataacgtacgggcaaatgaacttcgtggcgagaagcgcaatcgcctcatgctttagaaccgtccggtacaaagacgtagcccagaccccagacggtctgaatgtaacgcggatgcgccggatcttcttccaccatgcggcgcagacgcgaaatctgcacgtcgatggagcgttccattgcggaatattcacgaccacgggcaaggttcatcagcttatcgcgggagagcggctcacgcggatggctgaccagtgccttcagtaccgcaaactcaccactggtgagcggcatcggctcgtcttcgcggaacatttcgcgcgtaccgaggttaagtttgaacttaccgaaagcaattaccgcctcttcctgtgacggtgcgcctggcagttcgttcgcctgacgacgcagcaccgcacgaatgcgggccagcagttcacgcgggttaaacggttttggaatgtaatcgtcagcgccaatctccaggccaacgatacggtccacttcttcccctttcgccgtcaccataatgatcggcatcggattgctctggctacgaagacgtcggcaaatcgacaagccatcttcaccaggtaacatcaaatccagtaccataagatggaaagattcacgagtcagcaggcgatccatctgttctgcattagcgacgcttcgaacctggaagccttgttcggtgagataacgttccagcagcgcgcgcaggcgcatgtcgtcatcaaccaccagaatcttgtagttctcttgcattgtttgtactcccaaaggttcgcaacaatttgtaagcgtgtattcttaaaaaagctcacgttcgtcaccagctaaatctggtatgaatttcagcctaaattgttacaaagcatattaaacagcagcttaagtatacaatttattcggcgaaacattattgattctgttgatatgatcacgttatacccaatgtgcgcattatcaaacagacaaagggaatcaacgagatgaaaacgcccctggttacccgggaagggtatgaaaaactcaaacaagagcttaattatctctggcgtgaagaacgcccggaggtcacaaagaaagtgacctgggccgcaagtctgggcgaccgcagcgaaaatgctgactatcagtataataaaaagcgcctgcgtgaaatcgaccgtcgcgtgcgctatctcactaaatgcatggaaaatctcaaaatcgtcgattactccccgcagcaggaaggcaaagtcttttttggcgcgtgggtggagattgaaaacgacgatggcgtgactcaccgtttccgtattgtcggctacgatgaaatttttggccgtaaagattacatctctatcgattccccgatggcccgcgcattgctgaaaaaagaagtcggcgatctggcggtggtgaatacccctgccggggaagcgagctggtatgttaatgctatcgagtacgtgaaaccgtaaggaagagtcttaacctcctgccgatggctggcatttttgccagccagtccgtataactatcccctgatttttgatccgaaaagatgaactcaaaccatgatgaatgattcgttctgccgcattattgcgggtgaaattcaggcgcgcccggaacaggttgacgctgccgttcgcctgcttgacgaagggaataccgtgccgtttatcgcacgttatcgtaaggaaatcaccggcggtctggatgacacgcagctgcgtaatctggaaacgcgtctgagctatctgcgcgagctggaagagagacgtcaggcgatcctcaagtccatttccgagcaaggcaaactcaccgatgatctggcgaatgccatcaacgccaccctaagcaaaaccgaactcgaagacctctacctgccctacaaacctaaacgccgcacccgtgggcaaatcgccattgaagcagggcttgagccgttggccgatctgctgtggagcgatccgtcacacacgccagaagtcgccgctgcacaatatattgatgccgataaaggcgtggcagataccaaagccgcgctggacggcgcgcgctatatcctgatggaacgttttgccgaagatgctgcgctgctggcgaaagtgcgtgattatctgtggaagaacgcgcatctggtctcaaccgtggtgagcggtaaagaagaggaaggggcaaaattccgcgactatttcgatcatcacgaaccactgtcaacggtgccttctcaccgcgcactggcgatgttccgtggtcgtaacgaaggcatacttcagctttcgctgaatgccgatccgcagttcgaagagccgccgaaagagagctattgcgagcaaatcatcatggatcaccttggcctgcgcctgaacaatgccccggcggatagctggcgcaaaggtgtggtgagctggacgtggcgcatcaaggtgttgatgcatctggaaactgaactgatgggcaccgtgcgcgaacgcgcggaagatgaagcaatcaacgtctttgcccgtaacctgcacgatctgctgatggcggcccctgccgggctgcgtgcaacgatgggcctcgatccgggtctgcgtaccggggtaaaagtggcggtagtcgatgcaactggcaaactggtggcgaccgataccatttatccgcataccgggcaggccgcaaaagcagcgatgaccgttgctgcgctgtgtgaaaagcataacgttgaactggtggcgatcggcaacggtacagcttctcgcgaaaccgaacgtttctatctcgacgtgcagaagcagttcccgaaagtgaccgcgcagaaagtgatcgtcagcgaagctggcgcgtcggtttactcggcttccgagctggcagcacaggaatttccggatctcgacgtttcgctgcgtggcgcggtgtctatcgcccgtcgtttgcaggatccgctggcggagctggtgaaaatcgatccgaaatctatcggcgtaggtcagtatcagcatgacgtcagccagacgcagctggcacgcaaactggatgcagtagtagaagactgcgtaaacgccgttggcgtcgatctcaacaccgcttctgttcctctgttaacccgcgtggcgggcctgacgcgcatgatggcgcaaaacatcgtggcctggcgcgatgagaacggccagttccagaaccgtcagcaactgttaaaagtgagccgtctggggccgaaagccttcgagcagtgcgcgggcttcttgcgcattaaccacggtgataacccgctggacgcttctaccgttcacccggaagcctatccggtggtggaacgcattctggcagcaacacagcaggcactgaaagatctgatgggtaacagcagcgaactgcgtaacctgaaagcatctgactttactgatgagaaattcggtgtgccgacggtaaccgacatcatcaaagagctggaaaaaccgggtcgcgatccgcgtccggaatttaaaaccgctcagtttgccgatggcgtcgagacaatgaacgacctgcaaccgggtatgatcctcgaaggtgcggtgaccaacgtcaccaactttggcgcgtttgtcgatattggcgtgcatcaggacggcctggttcacatctcttcattgtcgaacaagtttgtggaagatccgcataccgtggtgaaagcgggcgacattgtgaaggtgaaagtgctggaagtggatcttcagcgtaaacgtatcgccctgaccatgcgtctggacgagcagcctggcgaaaccaacgcccgtcgcggcggcggtaatgaacgcctgcaaaacaaccgcccggcagccaaaccgcgtgggcgtgaagcgcagcctgccggtaatagcgcgatgatggacgcgctggcggcagcaatgggtaaaaagcgttaaaccccctgattggcctacggttcaaattttcacgaaatcgtaggccagataaggcgttcacgccgcatctggcaatacacgccttgcctgacataaaaatgccggagtatatctccggcatttttattccacagccaaccccacaatatactccctaatatttatcacttcattaacaactgagaccttaattaaacattaaccagccctaataattcgtcatgcgaattatattttcgctgcgatataaccttgagccatatcaacattgagtcagattattattcaaaccaacattcacacacattttaagtattgctgatagaaaccattctcattatcattgtactgttgattatttaatctctccttcgttggcaaatcatctggtctcatgtcgctgtcaaacgccccatgaggtagttatccagttaatgagaaacaagtaggcacctatgcaatacactccagatactgcgtggaaaattactggcttttcccgtgaaatcagcccggcatatcgccaaaaactgctttctcttggcatgttacctggctcctcttttaatgtggtgcgcgtcgctccactcggcgaccccattcatatcgaaacccgtcgtgtgagcctggtattacgcaaaaaagatctggccttattagaagtggaagcggtttcctgttaatacggtgataacaacaatgaaaaaattaaccattggcttaattggtaatccaaattctggcaagacaacgttatttaaccagctcactggctcacgtcagcgtgtaggtaactgggctggcgttaccgtcgaacgtaaagaagggcaattctccaccaccgatcatcaggtcacgctggtggacctgcccggcacctattctctgaccaccatctcatcgcagacctcgctcgatgagcaaatcgcctgtcactacattttgagtggcgacgcagacctgctgattaacgtggtggatgcgtctaaccttgagcgtaacctgtacctgacgctgcaactgttggaactcggcattccctgcatcgtggcgctgaacatgctcgacattgccgagaagcaaaatattcgcattgaaattgatgctctgtcggcgcgtcttggctgcccggtgatcccgctggtttcaacccgtggtcgcggtattgaagcgctcaagctggcgattgatcgctataaagctaacgaaaatgtggaactggtgcattacgctcagccgctgctcaacgaagcagattcactggcaaaagtgatgccttccgacatcccgctgaaacaacgtcgctggctgggcctgcaaatgctggaaggcgatatctacagccgcgcctacgccggtgaagcgtcgcagcatctggatgccgccctcgcccgtctgcgtaatgagatggacgatccggcgctgcacattgccgatgcgcgttaccagtgcattgctgccatctgtgatgtggtaagcaacaccctgacggcagaacccagccgtttcaccactgcggtagataaaatcgtgctcaaccgtttcctcggtctgccgattttcctctttgtgatgtacctgatgttcttgctggctatcaacatcggcggggcgttacagccgctgtttgacgtcggctccgtagcactctttgtgcatggtattcagtggattggctacacgctccacttcccggactggctgactatcttcctcgcccaaggcctgggcggtggtattaacaccgtgctgccactggtgccgcagatcggcatgatgtacctgttcctctccttccttgaggactccggctatatggcgcgtgcggcgtttgtgatggaccgtctgatgcaggcgctgggcttgccggggaaatcctttgtaccgctgatcgttggtttcggttgtaacgtaccgtcggtaatgggcgcacgtacgcttgatgcaccgcgtgaacgtctgatgaccatcatgatggcaccgtttatgtcctgcggcgcgcgtctggctatcttcgcagtattcgcggctgccttcttcgggcagaacggtgcgctggcggtcttctcgctgtatatgctgggtatcgtaatggcggtgctgacgggcctgatgctcaagtacaccatcatgcgcggtgaagcgacgccgtttgtcatggagctgccggtctaccatgtaccacacgttaaaagcctgattatccagacctggcagcgtctgaaaggcttcgttctgcgtgctggtaaagtgattatcatcgtcagcattttcctgagcgccttcaacagcttctcgctgagcgggaaaatcgtcgataacatcaacgactcggcgctggcttccgtcagccgggtgatcaccccggtcttcaagccgattggcgtgcatgaagataactggcaggcaacggttggcctgtttacaggtgccatggcgaaagaagtggtagtgggtacgctcaacaccctctacaccgcagaaaatattcaggacgaagagttcaatccggcggaatttaacctcggtgaagagctgttcagtgcggtagatgaaacctggcagagcctgaaagacaccttcagccttagcgtactgatgaaccccattgaagccagcaaaggcgacggcgaaatgggtaccggggcgatgggcgtgatggatcagaaattcggtagcgcagctgccgcatacagctacctgattttcgtcctgctgtacgtaccgtgcatctcggtgatgggggctatcgcgcgtgaatcaagccgtggctggatgggcttctccatcctgtgggggctgaatattgcttactcactggcaacattgttctatcaggtcgccagctacagccagcatccaacttacagcctggtgtgcattctggcagttatcctgtttaacatcgtggttatcggtctgctgcgccgcgcgcgtagccgggtagatgtcgaactgctggcaacgcgcaaatcggtaagcagttgctgtgcggccagcaccaccggtgattgccattaatggcttcacttattcaggtgcgtgatttgctggcgttacggggccgtatggaagcggcccagattagccagacactgaacactccgcagccaatgattaacgccatgctgaaacagctagaaagtatgggaaaagcagtgcggattcaggaagaacctgacggctgtctttccggcagttgtaaaagctgcccggaaggaaaagcctgtctgcacgaatggtgggcgttgcgttaaccttgtttcactgcctgttttgaaagcccggtatgcgtttgcatcctggcttttttgcgtgcggctttccataaaaatgcaacccttgcagcgcgacgtaagttcctctgaaagcgtctcgcagggatgaaaactcgctaatgcacaggtgtggagtggcgcgtagagtcgcggcattcaaataacaggtgaaggaacgccatgagcaaaaagcagagttccaccccacacgatgcgttacgccattgccgcaatgcaaaatcaccttgatgccggatacaaaacattgccgatggtggtgccattgttgttttatcacggtattgaaagcccctatccctattcgctgtgttggctggattgtttcgccgatcccaacctggcaaggcagctttatgcctctgcatttccgctgattgatgtcaccctcatgcctgatgatgaaatcatgctgcaccgacgtatggcgctactggagttaattcaaaaacatattcgtcaacgcgacctgatggggctggtagagcaaatggcctgcttattaagtagtggatacgctaatggcagacaaatcaaagggctgtttaattacatactgcaaaccggcgacgcggtacgttttaacgattttatcgatggtgtggccaaacgttcaccaaaacacaaggtgagtttaatgactattgcggaaagattgcggcaggaaggggaacaatccaaagccttgcatatagcaaaaataatgcttgaatccggagtccctcttgcagacatcatgcgctttaccggggtgtcagaagaagagttggctgcggcgagccagtaaagttctgtcccgccatttcgaaagccacctacaccctctgcttcaacgccaccagcagatgacaaaactcgtccggatgtgaaataaacggcgcatgggccgctttggcgaagatatatgattcgctgtgaggccaaagtttatccagcatcggcaccactttgcgcggcaccagaccgtcgagatagccatacaatcgcaaaaacggcatgggcacgttttgcagcggctgacggagatcgaccgttttcaggatttccagcccgccattaagcacgtcaacctccggcatcggtaacgccagaacggttttcttcaacgcccgcgcatcctggcgcgccgtttcagtacccatggtttgtaacgccaggaaccgctccactgtacgctgaaaatcatcactgagttgctgctgaaatcccgccagcacgtccggttttatccccggccactcgtcgcgagcactaaaacaaggtgacgacgccacggtgaccagcgccagaacccgctcgggatgggttaacgcaatctggcttgccaccagcccgcccagactccagcctaaccaaatggctttatctggtgcctgtcgcagcacgacttcggccatatcagcaagtgatagcgcaccaaatccccggctacgcccgaagccgggcaggtcaacaaggtgcagcgtaaaatgcgagctaagttcctcgtcaatgcaacgccacacttcggcattcagtccccatccgtgcagcagcacaagatgaacattcccctgacctttggtctgccaccagatgttattcatccgctattgttctctttttacttacaaggatgaacatatgctaacagtaccgggattatgctggctatgccgaatgccgctggcgttaggtcattgggggatttgttcggtatgctcacgcgccgcccgtacagataaaacgttatgcccccaatgtggattacccgccacacactcacatcttccctgcggtcgctgcctgcaaaaaccgccgccctggcaaagactggtcacggttgccgactatgcgccgccgttaagcccgctaatccaccagcttaagttttcccggcgcagcgaaatcgccagcgccctgtcacgtctgttactattggaggtcttacacgctcgtcgcaccaccgggttgcaattgccggatcgcatcatcagcgttccgttatggcagcggcgtcactggcgtcggggatttaatcagagcgatttgctgtgtcagccgttatcacgctggttgcactgccgatgggatagcgaagccgtcacacgaacacgggccactgcgacccagcattttctcagtgcccggctacgcaaacgcaacctgaaaaatgcctttcgtcttgaattgcccgtgcaaggtcgccatatggtgattgtggatgatgtcgtcaccaccggaagtaccgtcgcagagattgcgcagttgcttttacgcaatggtgcggcgactgtccaggtctggtgcctttgtcgaaccttgtagagcctcgatgatgggcgtattataaccaactaaaatagtcaactattaggccattactatgatccgtatttccgatgctgcacaagcgcactttgccaaactgctggcaaaccaggaagaagggacacaaatccgcgtatttgtgattaaccctggcacgcctaacgctgaatgtggcgtttcttattgtccgccggacgctgtggaagccaccgacactgccctgaaatttgacctgctgaccgcgtatgttgatgagttaagcgctccttacctggaagatgcagagatcgattttgttaccgaccagttgggttcgcagctgacgctgaaagcgcctaacgccaaaatgcgtaaagtggctgacgatgcgccgctgatggagcgcgtggagtatatgctgcaatcacagatcaacccacagcttgctggtcacggtggtcgcgtttcgctgatggaaatcaccgaagacggttacgccattttgcaatttggcggcggctgtaacggttgttccatggtcgatgtaacgctgaaagaggggatcgagaagcagttgctgaacgaattcccggagctgaaaggtgtacgcgatctcaccgaacaccaacgcggcgagcactcttactactaagttctctcctcttttgtcgattgcccgatgtgacgctaaagcgtcttatcgggcctgtacgttgcacgagagtctgacattagcgcagaattacctcagcaaatccaatctcttcgtttccccacgataatatgaccaacctctcataatttaaatttaccccgctctggtgattctcaagcacgtaatgttacccgtatcattctcatgggcaccaaacacactcataacatctgactacactaactcgttttaggggtcatcagccgtggtgccgtaacatctctgttcccagttgggacaaccaggattttccgtcagaaacctgacgttacccataacaaattaaaggccaggtaaatcatgccattagtcattgttgctatcggtgtaatcttgttattactcctgatgatccgcttcaaaatgaacggcttcatcgctctcgtcctcgtggcgcttgctgttggattaatgcaagggatgccgctggataaagttattggctccatcaaagccggtgtcggcggaacgctcggtagccttgccctgatcatgggttttggtgcgatgctgggcaaaatgctggcagactgcggtggcgcacaacgtatcgctaccacactgattgccaaatttggtaaaaaacacatccagtgggcggtggtactgaccggttttaccgttggttttgccctgttctatgaagtgggtttcgtgctgatgctgccgctggtgtttaccatcgcggcttccgcgaatattccactgctgtatgttggtgtaccaatggcggctgcactgtctgtgacccacggcttcctgccaccgcatccgggtccgactgcaattgccaccattttcaatgccgatatgggtaaaactctgctgtacggtactattctggcaatcccgaccgtgattctcgccggtccggtttacgctcgcgtgttgaaaggtatcgataagccgatcccggaaggtctgtacagcgcgaaaaccttcagcgaagaagagatgccgagctttggcgtcagcgtctggacctctctggtgccggtggttctgatggcgatgcgtgcgattgccgaaatgatcctgccgaaaggtcacgctttcctgccggtagcggagttcctcggtgacccggtaatggctacgctgattgccgtgctgatcgcgatgttcacctttggtctgaaccgtggtcgttcaatggatcagattaacgacacgctggtttcttccatcaaaatcattgcgatgatgctgttgattatcggtggtggcggtgcgttcaagcaggtgctggtagacagcggcgtggacaaatacattgcttccatgatgcacgaaaccaacatttctccgctgctgatggcctggtcgattgctgccgtactgcgtatcgcgctgggttccgcaaccgtcgcggcaatcactgcgggtggtatcgcggcaccgctgattgcaacgacgggtgttagcccggagctgatggttattgcggttggttccggtagtgtgattttctctcacgtgaacgatccgggcttctggctgttcaaagagtactttaacctgactatcggcgagaccatcaaatcctggtcgatgctggaaaccattatctcggtgtgcggtctggtaggctgtctgctgctgaatatggtgatttgataatactgatggccggatgcggcgtgaacgccttatccggcctacgattcggcattaattagtaggccggataagacgcgtcaagcgtcgcatccggcatcaaccgcactctacttcttcttcgctgccgctctgcgccgtctgtccaaatccttcagcaatttgttcacaccatcatcggcaaacatcgactcaagcgttgcggaaagtttacgtcgccagtttttatactggtaactggtgccgggaatatttaccggatctgccatatccagccagtcttccggctgtagccctaacagggcgctgttgctatcggcgatgtagcgctgtaagccacgattcagcgtcggtgtcatcgacatcaacgatgccttatgcccggcacgttttggcaggcaaccatatttatgcagagcatccagcagcccttgcttcgccagttcgcgatcctgatacagaccgcgcagtaccacttcatccggatacagccccagcgttttgcccagcgttaaatccccactctcccagtagccgcgtagcgtaggcaggtcgtgtgtcgccgcaaccgccatcgactgctctgggtacgctttcggtgcgcggaatgtcttctcgtggtcgttttcgaaatagagcactttgtaggagtacacaccgctgctgcgcagcttaccgacaatctctaccggtacggtaccgagatcttcaccaatcaccatacagcgatgacgtttactttcgagtgccagaatcgagagcagatcatccaccggatagtgaacatacgcgccctgatctgccgtctcgccatacggtatccaccacaaacgcagcatcgacatcacgtgatcaattcgtaatgcgccgcagttttgcatattggcacgcaacagctcgataaacggttcataggcacgcgcggtgatgatatgcgggtccattggcggcaatccccagttctgccccaacgggccgaggatatccggcggcgcgccaaccgacgctttcaggcaatacagttcacggtcgcaccaggtttctgccccaccttctgctacaccaacggccagatcacgatacaagccaatcggcatttcatagccctggcttatctcccagcaggcggcaaactggctgtaagccagccactgcaaccagagataaaaatcgacgtcatcacgatgttcttcgcagaactggcgcacttctggtgaatccacgttctgatacatctctggccatgctggccagccccagcacatttcgtcctctttcacttgctgggcatgtagcgcatcaaaggctgcctgccagaacaggctgtcgccctgctctgcaacaaactggcgaaacgcggtcatctgctcatcatcacgttgcgcgaaacctttccacgccattcgtaatgctgtcatttttagggcggtaaccgtggagtaatcaacccagtcggcatcccgcgcctgttgcagcgtctgttgcgtggtcggcaactgccaccaggcctgagcctcttcgctaagatggaaatcttcaactgcgttaacgtcgatataaatcacattcagccaacggcgagaagacgggctgtacgggctggcactttccggatttgccagatagagcgcatgaatcgggttcagaccaataaacgacccgccacgttttgccacatccaccagcatcgctttgagatcgccaaaatccccaataccccagtttttttccgatcgcagcgtataaagctgaacgcaggcaccccacagcttttgtttattcagcaacgcctgcggttcgtaacagcgtttcggggcgacaatcacccggcaatgcgcgcgctggtcgtcctgggtaagcgtcagcgtgtgataaccttccggcagcttcgtcggtagattgaacgctttgccccccgtcacatggcctttgtactgctttccttcttcggtagtcagcagccagctaaattcaccgctgccctccaccaccatcggcatttttttgccgctggtataaaccatgacattcgggactggcgttaccgccactttcgtggcggtacgttgatgcatcgcgtcaagcaaacgccgtttggtttcggcgctaatcgactgcggtttaccgtgggcattgatgtaattggagctgatccccgccgccagcgcggcattatccagacgtttgctttccatcgagcttccttagcgttttgcctgccagatacgagcctgataatcgcgaatagagcgatccgagctaaacataccgcagcgggcggtattgaggatcgccgcgcgagtccaggcctcctggtcgcggtacagcacatccacctgcttttgtgcctctacataagcggcgaaatctgccatcaccagatacggatcgccgccctgtttgccgatactgtgcagcatctggtcgaaggcatgcttatcgccgtcgctgtatttaccgctttccagctctttcaatactgcgtccagcaccttatctttcttccgccatttcaccgggtcgtagcctttggccagaattgccttcacttgttccacggtatgaccaaaaataaagatattttcttcaccgactttctcagcgatttcaacgttcgcaccatccagcgtaccgacagtaagcgcaccattgagcgccagtttcatattgccggtaccggaagcttctttacctgcagtcgaaatttgttcggagatatccgccgccgggatcagtttttccgccgccgaaacacaataatccggcaagaacaccaccttcaacttgtcgccaaccagcggatcgttgttgatcacgtcagccactttgttgatcgcaaagataatatttttcgccaggtagtagcccggtgctgctttcgcgccgaagaggaagacgcgcggtacgcggtcagactgcgggttttcacgaatttctttgtacaacgccagaatatgcagcagattcagatgctggcgtttgtactcatgcagacgtttgatctgaatatcgaaaatcgcctgtggattgatctcaataccggtacgaactttcacaaactctgccagacggactttattcgcctgcttgatctcgcgatattgctgacggaatttcgcatcatcagcgaatttttccagattgatcagttgatcgagatcgttagcccactcttttttcagtgatttatccaacagagccgccagtgccgggttgcactgtttgatccagcgacgtggggtaataccgttggtgacattatggaatttgttcggccatagctggtgatattccgggaacagatctttcaccaccagatccgagtgcagcgccgcaacaccgttcaccgcgaaaccgccaaccacacacaggttcgccatatgcacttgtttgtcgtgtaccaccgccagtttggcccacactttttcatcgcccggccaggttttttccaccagcgttttaaagcgagtattaatttcgttaataatctgcatgtggcgcggcagtaagcctttcaccagtttcacatcccagcgttccagcgcttctggcatcagggtatggttggtgtaagcgaaagttttgctggtgatggcccaggcgtcatcccagctcatctggtgctcatcgatcagcacgcgcagcagttctggaatcgcgatagttgggtgggtatcgttcagctgaataacttcgtaatccgccagttcgtgcagtttacgccccgccagatgatggcgacgcaaaatatccgctaccgagcaggcacactggaagtattgctgcatcaggcgcagctttttaccggcagtatggttgtcgtttggatagagaactttggtcagtttttccgcgttgatgccctgctgttcggcacgcaggaaatcaccgtcgttaaatttagtcagatcaaacggatgcgcatgcgtcgcctgccacagacgcagtggctgcgccacgccattacgatagccgacaacggggagatcccacgcttgaccggtaatggtaaactccggctcccagcgtccatctttcgtcactttaccgccaatccctacctgcacatccagtgcttcgttgtggcggaaccacgggtagttaccgcgatgccagtcatccggcgcttcaacctgtttgccatcgacaaatgactggcggaacaagccatattgataattaaggccgtagccagtagctgactgcccgacagttgccattgagtcgaggaagcacgccgccagacgtcccagaccaccgttccccagcgccgggtcgatctcttcttccaacaggtcagtcaggttgatgtcataagccttcaacgaatcctgtacatcctgataccagccgagattcaacaggttgttgcccgtcaggcgaccaatcaaaaactccattgagatgtagttaacatgtcgctgattcgccactggcttggcgaatggctgagcacgcagcatttcggccagtgcttcgctcactgccagccaccactggcgaggagtcatttcagccgcagaatttaagccataacgctgccactgacgtgaaagcgcttcctgaaattgcttatcgttaaaaataggttgtgacataggagttccacttttcttagattttcaacacaacgttatcgctagtttgccaggctcgatgttgaccttcctcatcctgcgggggattaggcagggaggagttgcggggatgagcaaggaaatgtgatctcgaccacttaaagctagtgcaatccacaggattagcagcaaatcaatgccataccgcgcagaaaatctgtatctaagtgcaaaaaatggccgttgcgtattttcaaaaagcggaaggtaactctataaattaagtaaaggagtgaaacagtttcacaagtaaaatatcaagtgtgctccatctcattcttaatagatttattaagatcatctttttagatggcactttcatcagaaatgaagaagaaacccttgcttaaatgaaactgatgaacataaggaaaataccgtacaacccagtattcacgctggatcagcgtcgttttaggtgagttgttaataaacatttggaattgtgacacagtgcaaattcagacacataaaaaaacgtcatcgcttgcattagaaaggtttctggccgaccttataaccattaattacgaagcgcaaaaaaaataatatttcctcattttccacagtgaagtgattaactatgctgattccgtcaaaattaagtcgtccggttcgactcgaccataccgtggttcgtgagcgcctgctggctaaactttccggcgcgaacaacttccggctggcgctgatcacaagtcctgcgggctacggaaagaccacgctcatttcccagtgggcggcaggcaaaaacgatatcggctggtactcgctggatgaaggtgataaccagcaagagcgtttcgccagctatctcattgccgccgtgcaacaggcaaccaacggtcactgcgcgatatgtgagacgatggcgcaaaaacggcaatatgccagcctgacgtcactcttcgcccagcttttcattgagctggcggaatggcatagcccactttatctggtcatcgatgactatcatctgatcactaatcctgtgatccacgagtcaatgcgcttctttattcgccatcaaccagaaaatctcacccttgtggtgttgtcacgcaaccttccgcaactgggcattgccaatctgcgtgttcgtgaccagctgctggaaattggcagtcagcaactggcatttacccatcaggaagcgaagcagttttttgattgccgtctgtcatcgccgattgaagctgcagaaagcagtcggatttgtgatgatgtttccggttgggcgacggcactgcagctaatcgccctctccgcccggcagaatactcactcagcccataagtcggcacgccgcctggcgggaatcaatgccagccatctttcggattatctggtcgatgaggttttggataacgtcgatctcgcaacgcgccattttctgttgaaaagcgccattttgcgctcaatgaacgatgcactcatcacccgtgtgaccggcgaagaaaacgggcaaatgcgcctcgaagagattgagcgtcaggggctgtttttacagcggatggatgataccggcgagtggttttgctatcacccactgtttggtaacttcctgcgccagcgctgccagtgggaactggcggcggagctgccggaaatccaccgtgccgccgcagaaagctggatggcccagggatttcccagcgaagcgattcatcatgcgctggcggcaggcgatgcgctgatgctgcgcgatattctgcttaatcacgcctggagtttgttcaaccatagcgaactgtcgctgctggaagagtcgcttaaggccctgccgtgggacagtttgctggaaaatccgcagttggtgttattgcaggcgtggctgatgcaaagccagcatcgctacggcgaagttaacaccctactggcccgcgctgaacatgaaatcaaggacatcagagaaggcaccatgcacgcagaatttaacgctctgcgcgcccaggtggcgattaacgatggtaatccggatgaagcggaacggctggcaaaactggcactggaagagctgccgccgggctggttctatagccgcattgtggcaacctcggtgctgggtgaagtgttgcactgcaaaggcgaattgacccgctcactggcgttaatgcagcaaaccgaacagatggcacgccagcacgatgtctggcactacgctttgtggagtttaatccagcaaagtgaaattctgtttgcccaagggttcctgcaaaccgcgtgggaaacgcaggaaaaagcgttccagctgatcaacgagcagcatctggaacagctgccaatgcatgagtttctggtgcgcattcgtgcgcagctgttatgggcctgggcacggctggatgaagccgaagcgtcggcgcgcagcgggattgaagtcttgtcgtcttatcaaccacagcaacagcttcagtgcctggcaatgttgattcaatgctcgctggcccgtggtgatttagataacgcccgtagccagctgaaccgtctggaaaacctgctggggaatggcaaatatcacagcgactggatctctaacgccaacaaagtccgggtgatgtactggcaaatgaccggcgataaagccgccgctgccaactggttgcgtcatacggctaaaccggagtttgcgaacaaccacttcctgcaaggtcaatggcgcaacattgcccgtgcacaaatcttgctgggcgagtttgaatctgcggaaattgtcctcgaagaactcaatgaaaatgcccgcagtctgcggttgatgagcgatctcaaccgtaacctgttgctgcttaatcaactgtactggcaggccggacgtaaaagtgacgcccagcgtgtgttgctggacgcattaaaactggcgaatcgtaccggatttatcagtcattttgtcatcgaaggcgaagcgatggcgcaacaactgcgccagcttattcaactcaatacgctgccggagctggaacagcatcgcgcacagcgtattctgcgagaaatcaatcaacatcatcggcataaattcgcccatttcgatgagaatttcgttgaacgtctgctaaatcatccggaagtgccagagctgatccgcaccagcccgttgacccaacgtgaatggcaggtcctggggctgatttactccggttacagcaatgagcaaattgcaggcgagctggaagtggcggcaaccaccatcaagacgcatatccgcaatctgtaccaaaaactcggtgtcgcccaccgtcaggccgcggtacaacacgcgcagaaactgctgaagatgatgggatatggggtatgagtttagccggataatgcgccagatccggcttacatctttacatcattcaatgctcacccgcgttacgccatctgtttctatcagactaaaccgcactggcaagaaacgctccaccaccgcgatattggtctgcagatggcatgagggatgggcgaccgtaaattctcccgcccccgccagcgccatcggtagcaccagttggtcggcgagatattcccccaccgccgccgggcttgccaggtagcgtttcacctctttcaccaactgtgccgcgaccacctcggcactgacgcgcttttcaccgacgacaaaaaagcgttcggtgatattttcactttcgacttcaagcgagacggtattacccggcccctggtcgcgcggcaggttatgaatattctgttcatgcaaggaaaaactacccgccagtgtagcgatttcacgctcagcaacatggcgcggcacaccagccagtagcacctctccacgcatctgcacaatgttcccgcgctcgccaagttgcaagctattaaacgatgccaccggtgagacttccgttgctaccacgccgcctccggcaggataaaaaccgtgacgtaacagcgtggtttgctgatgaactcctattctcgccagcagcggctccagcacccgacggataaaatccgcaggcggggccgacgggttatcggtgccgccgctcacttcaacacgcgaaggtccatcggcaaaccacagcgcgggcagcaccgtttgcagcaccagcgtacaacttccggcgctaccgatagcaaagcggtaatcgccgccgcgcacggtgccaggtcggaagaccagacgctgcgaccccagctcagcgccttccaccgttgccctacaaatttccgcagccgcttttaccgcggtcagatgttggcgcaacagccccggtttcgcccgcccggcacgaatgccggtgatggtaaatggctggccggttatcatcgacaggctcagcgccgagcgcaggatctgcccgccgccttcgccctgtgcgccatccagcgcaatcatccttttcatcatttatccttttacgcacaccacctgacgcagggtatagataacttccaccagatcgctttgtgccgccatcaccgcatcaatatctttatacgccatcgggatttcgtcgatcacctcggcatctttacggcactccacatgcgcggtggcacggatttgatcttccacactgaacagttttttcgctttagtacggctcattacccgcccggcaccgtggctgcacgaacagaacgactcttcatttcccagcccacggacgataaagcttttcgcccccatcgaaccgggaataattccatattgaccagcacgcgcagacaccgcgcctttacgcgtcacatagatctcttcgccaaagtgcagttctttttgcacatagttgtggtgacagttgatctcttccatcgccagcgtttgtggctgttttaccgttttctgcataacgctctgcaacgccgttaccacgttttccatcatcgcatcgcggttaaggctggcaaaaagctgcgcccaggccacggctttcaggtaatcatcaaagtattccgtaccttccataaagtacgccaggtcacgcgatggcaacgtttcaagcgtttcctgcatctctttttgcgccagatcgataaaataagttccgatggcgttaccaattccgcgtgaaccggagtgcagcataatccacacctgatccgactcatcaaggcaaatttcaataaagtggttacccgtacccagcgttcccaggtgtttatagttattagtgttaaggaaacgcggatatttttgcgttaaccactgataaccggcctccagctcagcccatttcgcatcgacgttaacaggcggattttcccatgcgcctttatcacgtttacaacgcccggtagtacgtccgtgcggtacggccgtttcaatcgcctgacgcagctctgccaggttttcaggcaggtccgccgccgttaacgcggtacgcagtgcgttcattccacagccaatatccacgcccaccgccgccggaataatcgcccctttggtcgggatcacgctaccaatggtggaacctttacccaggtgtacatcaggcattaccgcaatatgtttgaaaataaatggcatcttcgcggtattaataagttgctgacgcgcatcggcttctaccggcacgcctttggtccacatttttaccggagcattttcagtggtcagtaattcgtaattcattttgtttttctcttttcgttgtttgctgtcctgataattgcaaccgtcgtgccagaaaatcaaataagcatattaattttttaattcattgtttttaaaaatattatatttttacgtccgtaaacggagatttcccgcaaagccgatttaccgataatgaaatctcgtcttttataaggatatctaagatgcgtaaaacagtggcttttggctttgtcggaacggtgctggattatgccgggcgcggcagtcagcgctggtcaaaatggcgtccgacactctgtctatgccagcaagaatcgttagttatcgatcggctggaattattgcacgacgcccgctcgcgctcgctattcgaaacgcttaaacgcgatatcgccagcgtttcgccagaaacagaagtggtgggcgttgagatagaactgcataacccttgggatttcgaagaggtttacgcctgcctgcatgatttcgcccgtggttacgcgttccagccagaaaaagaagactatttaattcacatcaccaccggtacccacgtcgcgcagatttgctggtttctgctggcagaagcgcgttacctgcccgcccggttgatacaatcttcaccaccgcgcaaaaaagagcggcccgatagccctggcgcggtgacgattatcgatctcgatttaagccgttataacgccatcgccagccgctttgccgaggaacgccagcaaacgcttgattttcttaagtccggcattgccacgcgtaactcccacttcaaccgcatgattgagcagatcgaaaaagtggcgatcaaatcccgcgcaccgatcctgcttaacggcccgaccggtgcgggtaagtcatttttggcgcgacgcatctttgaattaaaacaggcacggcatcagtttagcggcgcgtttgtggaagtgaactgcgccaccctgcgcggcgataccgccatgtcgacgctgtttggtcatgtgaaaggcgcgtttaccggggcgcgggaatcgcgtgaaggattattacgcagcgccaacggcggaatgttgtttcttgatgagattggcgaactgggcgcagacgaacaggcgatgttgctaaaagccattgaagagaaaaccttttacccgtttggcagcgatcgccaggtgagcagtgattttcagcttatcgccggaacggtgcgcgatttgcgccagttggttgccgaaggcaaatttcgtgaagacctgtacgcgcggatcaatctctggaccttcaccttgccaggattacgccaacgccaggaagatattgaaccgaacctggattatgaagtggggcgccacgcctcactcactggcgacagcgtgcgttttaacaccgaagcgcggcgtgcctggctggcctttgcgacctctccccaggcaacatggcgcggtaactttcgcgaactttctgccagcgtcacgcggatggccacctttgccactagcggacgcatcacactggatacggtggaagatgagatcaaccgtctgcgctataactggcaggagagtcgcccctccacgcttacggcgttgctgggcgcagaggcagaaaacatcgatctcttcgaccgtatgcaactggaacacgttatcgctatctgccgccaggcaaagtcgctttctgctgccggacgtgaactgtttgacatttcgcgccagggtaaagccagcgtcaatgacgcggatcggctacgcaaatacctggcgcgttttggtctgacatgggaagcaatgcaggatcagcacagctccagttgaatatgatggtccttcagcacctgcatcacgctcgcaggcggcatcgtgtcggtgtagacagcatcgaccatgctgatgctacccatattgaccattgcgttacggccaaattttgagtggtcgacaaccagcataacgtggcgcgagttctcaatgatggcgcgtttggtgcgaacttcgtggtaatcgaactccagtagcgagccgtcgctatcgatgccgcttatccccagaatgccgaaatcaaggcggaactgggagataaaatcgagcgttgcttcgccaatgatcccgccatcgcggctgcgtaattcgccaccggcaagaatgatacggaaatcctcttttaccatcagcgtgttagcgacgttgagattgttggtcacaatgcgtaaattgctgtgattaagcagcgcgtgcgccaccgcttccggcgtggtgccgatatcgataaacagcgtcgagccattgggaatttgctccgccactttgcgggcgatgcgctctttttcttcggtctgggtggccttgcgatcgtgccacggcgtattaaccgaactggaaggcagcgccgcaccgccatgatggcgcaggatcaggttttgctctgccagctcgttgagatcgcggcgaatagtctgcgggctaacggagaaatgctctaccagctcctcggtgctgacataaccctgctgtttaaccagttcgataataccgttgtgacgttgtgtttgtttcattgataaatccctggaattattttcgttttcgcgcattgagcgaatcaacaaaagccatcgctaaacccacggctaacccggcgatgtgtgctccgttcgccatcgacatcccaaacaaatcaaaccatccggcgacaatccagatcaacgcaaagataattaacccacgttgcaggtaaatgccactttgcggatcgcgttcgccacgtagccagacgtagcccatcagcgcatacaccacgccagaaagcccgccaaaccacggcccgctgaatttttgctgcacatagccgcttaacagggcgctaatgagagtaatgacaattagcttaccgctaccgaggcgtttttccaccgcaccgccgagataccaccaccagagcaggttaaagaggatatgcatcagcgagaagtgcattaacgcgtgggtgaagtaacgccagaactcaaacttcagcgtcggatcgaatggccaagccagccataacatcacttcctgatcgccgagaatttgcatggcgataaacaccaccacgcaggcgatcatcatcacccaggttaccggacctgcgcgttcacgcaaggcggcaaagaaaggataacggcgataatgcaggccactgccggtatggcccgcctgccagctggccgccagataacgcggatctgccgggttttcgagaaaacgcgccagctccgcccgcacgcgctcggcctgggactcatccgccagccagacatcgctttggttatgttgttgaatcgtgaggataacaccctgcgtcgccatgtaatcaacaaacgcctgcgccacgcgggggttagcaaaagaggtaatcatcaacatcgttgctgtcgcttattccacacaaaaggggacagtataaagcgttacgcgccgtacgccacctctgcgggaaactggcgctgccaggcttcaaaaccgccatcaatgctgtagaccacatcgtagccctgttgcagcagatactgcgccgcgcctttgctgctattgccgtgataacacatcaccatcaccggagtgtcaaagtcgttatcacgcataaacgcgcccagcgtgtcgttggttaaatggaaagcctgcaccgcatgccccattgcgaaactctgtggatcgcgaatatcgaccagcaccgcctctttttcctgcaacttctggtgcgcgtcggcaacgttaatacattcgaactgatccatgcgtctctctttctttacaaacaagtgggcaaatttaccgcacagtttacgtcgaagcggcagataaacgccataatgttatacatatcactctaaaatgttttttcaatgttacccaaagcgcgattctttgctaatatgttcgataacgaacatttatgaactttaacgaaagtgaatgagggcagcatggaaaccaaagatctgattgtgataggtggcggcatcaatggtgctggtatcgcggcagacgccgctggacgcggtttatccgtgctgatgctggaggcgcaggatctcgcttgcgcgacctcttccgccagttcaaaactcattcacggtggcctgcgctaccttgagcactatgaattccgcctggtcagcgaggcgctggctgaacgtgaagtgctactgaaaatggccccgcatatcgctttcccgatgcgttttcgcctgccgcatcgtccgcatctacgcccggcgtggatgattcgcattggtctgtttatgtacgatcatctgggtaaacgcaccagcctgccgggatcaaccggtttgcgttttggcgcaaactcagtgttaaaaccggaaattaagcgcggattcgaatattctgactgttgggtagacgacgcccgtctggtactcgccaacgcccagatggtggtgcgtaaaggcggtgaagtgcttactcgtactcgtgccacgtctgctcgccgcgaaaacggcctgtggattgtggaggcggaagatatcgataccggcaaaaaatatacatggcaggcgcgcggcctggttaatgctaccggcccgtgggtgaaacaatttttcgacgacgggatgcatctgccttcgccttatggcattcgcctgatcaaaggcagccatattgtggtgccgcgtgtgcatacccagaagcaagcctacattctgcaaaacgaagataaacgtattgtcttcgtgatcccgtggatggacgagttttccatcatcggcaccaccgatgtggaatacaaaggcgatccaaaagcagtgaagattgaagagagtgaaatcaattacctgttgaaagtgtataacacgcactttaaaaagcagttaaaccgggacgatatcgtctggacctactccggcgtgcgtccgctatgtgatgatgagtccgactcgccacaggccattacccgtgattacacccttgatatccatgatgaagacggcaaagccccgctgctgtcggtattcggcggtaagctgaccacctaccgcaaactggcggagcacgcgctggaaaaactgacgccatattatcagggcattggtccggcgtggacgaaagagagcgtgctgccgggtggtgccattgaaggcgaccgtgacgattacgccgcccgcctgcgccgccgttacccgttcctgactgaatcgctggcacgtcactacgcgcgcacttacggcagcaacagcgaactgctgctcggcaatgcaggggcgataagcgacctcggtgaagatttcggtcatgagttctacgaagcggagctgaaatatctggtcgaccacgaatgggtccgccgcgccgacgatgccctgtggcgtcgcacgaaacaaggcatgtggctaaatgcggatcaacaatctcgtgtgagtcagtggctggtggaatatacgcagcagaggttgtcgctggcgtcgtaaggatgatgcccggttgtgaagtgcaaccgggctatttgaattccttagactattcattgtaaataattgaataacggccccagagctaaaatcgccaaacttaagcacgttacccaatcgccccacttcttcctatggcttctatttttgctacgccactggcaataatatcccaacgcaaaaccaagctgggcactaatcgggccgacaaaatcagtccacggctgcggccaaaaaggggaaaaattcaggggaagccagacaaatgtcagaaagaaatttcggatattttccagcaacgctgatttctctggagaaatataaagaatgaaattcgagagaattaaccagaaatagaccggagaaaagaccagccagcaatgtagcctgttttttaattcaggaggcgttctgcgggagaattgccaaccgatgccacccattacactgaaaaaaagtgcatatacaaccaataactcaagttgtaattcctgaagagaaatacgcacaaccaggagcggaaaggagaatattatttccgccagaaaagttaacgtgaatataagtacggctaaggcaataaccgtcggccataccaataatggtacgataacaaaaccgagaattacagggggaatataaagccggaatttaatcatttttattttcctggtgattcggatgatgcgtcatacatcgcgcataaacactcatcaatcatccagtcgtcttcccagatctgatactgtgtgccctgttcgggctgcttaagcgggttctcaatcgcctgccgcgcgcgttctttcaggatggattgattgttgaaggcccaggcattgatttgggcggtaatggctttatcgatatcgtcctggttatctctgatataaccgtcacgatacgtattcaataaacaggcaagagacgctgccgaccaaaatccgggaactgaaataatggcatcaagcaatggcgaaagagcgatatcggcacggaaaaacatttccagcttgtactgtaattcgacagcctcatccccggatacccaatcagtcatatactggcaagcaaattgctgcaatatttcccgttcatcctcacgccagttttctttactggcaaggtttatacgccgtagagaaaatacttcgtgaatattgtcaaattgcccctgcgcaacaaactccagtaaacgaggcagaaaataacgaacctcatcgctgttttgcggatcaggtcctggactactattccaggcattgattaaggaataaggaatcgctcgcaacgatgtattccgtaatgctttttgttcctgttgactcagacaatattcacaacaaaccacaaattgcttcggcgccggataacgacgaaaaatatgatatatctgctcaattaatgcctgcatggcaggagtggggtgcataattaccccctcgcccgctgatcgcgtgtaaagggttgatagacaaaacgagcattcgccgcattcaggcgaataatggcactacgagagagggaaaagctgggccgaatgcaataattacagtcccaacagctttcctctgtgcaattttccactgagtaatgacgcgcgtagagtttcagttcagcctgcttatcgcgaaatccgcgtaaactgttatcgttttgaaattgccaggcttctttaaacacttgaaagatataaacatcctcaatccaggcgtcacattttttaagcggacgctttgctatgatcacccgctcatccgggttgagcatcgccgtaaattgtacggtgaagtcatttgtcgtgttcagatcacattgaacatctggtacatcactgatatagaggtcaaatccaaagtcagcaccacaggcacaaagacggctaatggtggcggtatcgagggaaaatcccggccatacattgctggacgttaaaccaatatttaatgtgacatcatatcgagataatccctcaagaccggcagcaccggcgaacttttccccttcatccaggacctggttaatgagttgctgaacaatgccttcatcccagtatgttgatttgcagttggcaatcgtaatatccacgccagtgaatggatcagtaccggagaggcttgcaaataacgtatcaactaattccatttttattatccggcttaatgcaacattttattcatcggcacataacctacattttccaccaggtttttcccctgtagaattaaaaatatttttttgttttacattctgttcatccctattattgcattttattttgcggtgatagctaaaccgactctgtactggctcaaaaattactgatattccactcgcaatatagccagtgcattataacgacctgccgcaggcacttttccagttgtactaacaggtaaagtcagaaaagtaacatcagcagtttgcgcagaagcagcctggttttccaccaatctgaacggaacgcctactgatgttgccagggcatttaaatctacggagttttgctgactatccataatcataataccaacatcaggattatcttgtgcctgaataatactttgtttcccattggtatcacgtgtggcggaaatgttaccgtcgaataccaacgtcattaccgcatctgtatctttattcgtacaattaatcggaatagttgttgctacaggagtaacaccagcgggcttcgctccggcaccagcccggctcaattcactggcccacacatccggcatattaacagtaaaactcgtaccctcattaatagtgcaaccttgcggaacctgaatatttaagtttcctatgtaggcattaaagacagggataggaccatgttcggtagggatctggctgacatataatgacaccaataatacgttacttaatgaaacatcagatataatttttttatcaatcctgattttaatatatccttcagtacctgatgcccaattagatggtttgcttctgtcccccggataattggtattataattttcgaatggcacaattttatctgtcattgtgccattttgattataaagttttatatgagtagagacagatatttcatgggtgagtggaataaatacatcactcccttgatgatcaccactggcaccagacggatctattccagagacagcactgaagtaaatttcataatcatcaagagaattacaataagccttataggttccaaccttccagatttgtgatggcaatacagtgccaggcgcatttttgttgacatcagaaaccactatagtaccaaaattataagaaaaggatgcaggcgtagtattattactcggtgaacccggataacaatatgcacgttctcgccccatatcttcagcattagcaatagaagaaagaacatttgaaaatataataatcaataaaatgaaatatcttctataccaataagtatgtatacgcatatcatgtcctcagatatattattgactaaatgcaaagccagtaacatccaactgtgaaggatttaattttactttcaaaattggcaatacattattataaatgtccaatgtctgccatgctatttcacaaaccccttgcgatttacaccatgattgttggcgatggctaaatggtgcgaccataccaccatctataactttaccatcaacatgtaggttatagagtgtcacatatctggggcctggattataaacggtaacaatttcattttttcgtgcccagcgtaatttttgatatgacatattcgggtcttcagacaaatttgatggccgatagaatattttcatacgattgcggactgctatttgcaattgattatcagttttgactgaatgactattttccaacgttggtaatgctgcaacattcagtataaataaactttcccggtcggcaggtaaactgccaccaacacgattaattcttatttttgtatttttgtcaggcttcaaaataaacagtggcggagttgcgataaataccgtttcagaatatgagggcaaagattcaaccgttcccgtcaactgacgagcatcatcaggggagactgcaaccttgactaacatatctctgtctgaagtgtttttgagttcaacagatattgaggactgattttccggatacgcaaaacgcgttccaccgatcactaagcctgcttgtgctgtagagaataaaagggaaaataatactatgactaccttaatcataggtgacaataaacgatactgacgcatttgcatcccctggttggacattattttttaatgctttgtaagccgcaaaaaaatgcaatatattatcaactgatgatgtaagtgaaaaaaccatgcttttaacatcattactaatactgcctttgttcttatcaaaaatcgtaagtgcaagcccctctaccgagccatcttccagcttatataaactggcatcttcagaaactgtattgccggtaaactttatatacgcgttgccaacatcactaccacagcgggttaacgttatggaaaaataaaccttttcagtaacatcccctgcactccttaccgaactactgggtacgtctggcatattaactgtaaaattttttgactcatcagaaataatgcaggttttttcggtaattaacccttcaatacgaaccactccggcatgagtgatatcatcagcaaaagaatttgttgatattataaacaaaaataaactaatgaatatcttcatatctccctcactgataatcgatatcaaaatacaacagagcatttgcttgcccggcatgtacattttcctgagttgatttatagcgaagtttaaacgtcaaattagcatcaccgttttcatttaacactaaatcacgaaaacctgattcaccattaatggcaatcgccacatcattgttatccaatatttctattcccagtccagtcgcactatctgcaccggcggagagacgcagtaatgcgctattaatggcatctgcatcaccagtaaaccgcacattggcgctcacaccagaactataaacagtactttttgcagtcgggcatccttgtacattaatcgtaaacgtttgactcggagaaacatcacctacatttaaaaattcattagcatcataagtgcccatttttaccgactgatctttacttccggtagtaatgtcacagctttttgccaacaaaatcccagtaaatgtaacaacaactgaatcattggcctgccctgagagcggaaaagcaaaaaaagcgaaaaaaataaaaaatacagaatatttagagaatattaaattcattagcggcactccagagttgcatagctaacaggattatccagttctgtttcagggagcttgtaattagcctgacatttttgctgaacaccgtctccccactggatattaataacaccttctaaaggcaatcctgagagataaagttgtccattatcgccgacaatcccggtaatttgactactgtttttaatctgagcgctggctgtagcaccgaatgggactgatttattacgataacgaactgtgaacaaaccacgaataccgatatgagcagcaaactctgcacgaactaacgcaccttttcccggaataacttcagtggaagtgatatccagttcagtatgcatattcattgacataggatctaatgaaatattattacgtctatattctgttgcataaggaacaactgcatatccacgccagtcagtggatattcctgtcccccgctgaacatccacattattcgctccaggcgcttttatcaaaacattagtttcacctaatggttgactcaacgtaagaccattttcatgtacaacaagagcaccactgatgccatagtttatttgttgattaccttcattatcgtaactgtaggcggaattcaaggaaccatatgccccacgataattaacaccaacagaaccactactgctattatcctgattagcaaaaccatgttgtatgttataactgagattatgctgctccaacagagaaccagatacccccgtatattggtttacctgtccgtggttatcctgactataaccatacgttgcagtcatggcattcgatgatgagcgcccatcattcgtggaagataaccaattacttataggtaatgagacatttagcgagacaattttatccgcatttgtccctggtgatttactgtaattccacgcaacatttagatagatacccttaatactggtgttataaccaacttggtataaagaatcttttttatcagtattccagtatgtttgctgactagccgataaatacatagacccgtagttaccgaaaggttgcgatacactagcctgaaattttccacgtttgctataacgcaagttataaaaatcattccagttataaacgtaatctttatcatctaacgtttttggatcaacaacagtccctgacatttgttggtatgtcgtatcacttaaagtgtaaaagccctgggttgaataacgatagccaataatatggaatgctgttcctgtctgaactaacgatttggaataaagaaaacgataagattgcccttgatgtttgctcccatccacaagcgaactgttagcctgagtaacatcaaacgatgttgcaccaaatacacccagattcaggccaaggccgagcgccaacgcccggtaatcctcagagaattgtgccccaccataagccgtaatatcccagggtaaaccccaaattaattccccctgaaatacataaggacttttctggttatagctattgcttcgatattggccaaccgtagtagaatattttaaatgaccttctcgttgcaggatggggacagcggcataaggtacggtatagacagtttctgaattatcagactctttgatggtaacttccagatctcccgcagatgatgtcgggttaagatcgctaatctcaaacggtcccggcggcatataggtttgataaatgacataaccattctgtttgattgttacctgagcgcgacttttcgcaattccgcgcaccgtgggagcgaaaccactttgactatcgggcaacatattttcgtcagattccagttttatgccacgaatactaacactgtcgaaaacatctgatgatgaccatgtatctcctagcgttaattcacttctgaaaggaataataacgcgctgcaacgtactactgatatgctccagtttacctgctgaattactcccacgactccaggttgaataatcgcgaaaacgccatgcaccaatattgatcccagcgcgaagatttaaataatagttatttgaagagtaatcaccacgatcgttattaccagaaaagtcataattcagcaaaaaagctgtaataccgttatcccactgttctggtggaatatatccgcgagcgtcacgttttattatcgcctgtggaaaggtcagtttaagtctctgtgcatccagctccggcatgtaatgcacatcgggaaaccagatacgcaaatcaaggcaactattttcagatgaagccaaagcctgctctggcagcgcatttttgttaattccaaggcttaataagtcagcaagtgaaaggcagggaatcagttgattctcatcgtctgctttaaaagttacagtacgagagagtaaaggggaatcattgacccaaacttcgacttcatagctaccaggaagataagtcatccctttctcgaagcgggataagtcagcaacagcttcagtatcacccgacagaaaagcagggttaaagcgcattcccgcgattgaacatgcaggcataataaccagaagaagcggcacaacccgtttcatctgcttttgtgccgccatccaatattcgcatcttttgagctttaggttcatatccctgacctgtgttgcatctgaactattccgttgttactgcattattcctttctgccgctccgtcgtagcgccaaagtcattaattgtttgataagtaatttcaccagccaacgtcactggcgacgagaccgtaatatcacttttcggtggtacaaacatattgggcaatttactcccttgtactttaattcctgtcagtgtcaggtaataaggcgaaggattgataacttttagttgtttgccctcatacttaaaccgcaacatatttcgtgcttttcctggttgcacaggtagattttccgggcgataaaatagcttgattttgttttgtaatgccaactgtaaggtattcttctgtgtatttttctcatctgttggcggaattgctttaacattcatccaatacaaagtttcacgatcggtcggcaaattagtcttaccaagaaacatgatacgtaatgaagcttctttacgcgttggtaacataaagaggggaggagtgataacaaaatcctggctctttttttccgttttactgtcatcaacccatgattgaattaaataactggtgttgtcaccgctattttgcacactgagtgttatttgcttactttctgccggataaatcaatcgcgttacgccaaggccaaacccgcccgcggacgcattattaataaataatatcgatagtaaaaaaagaatccctgagcgtataatattttgtgatacttttaattcatccctgaatccacaaacccattttttatttccaataatacatttcatacagcatccttgttgatgaaataacatctgttattcatactctattaaataatttcaatctcaggttacaactttttgtaacctgaaatcgtatttatatttactcgtacagcacaacaaaacttgctgttgacttaactacacctggtgcaacagtgctaccgttttgagcataacctgcagtaaaggccgcgctgaaatcatgggtcgtagcatttcctggaattgtataagcggcggtggaggcgctaccctctgccgcagtggtattcaggttaatcagaccattattcgtcgtacctttggagtaaattcgaatccctacaccagtcgcccccgcattgccgctgttgtcagcatccgttgatccttctacttcgttagcgagcgttttattagcgctatctgcagtaccggtaaaacggaactcaattttctgatcatctgtattgctacattcggtcagattaatattgaaatcggtctggttgctcgccccctgtgcttctacgtcgataccagtgaaaaggttggaaggcacaaccggcaggacaacttcaatctgttttgaatcggttgcgaccttacaggtagctttcactacacggccagtaaagcggattttcccccccattgaatcaacgttgtcatccatatcagtgagcctgggataatcaacggtgctccagtcagtatccgccccaccaaattgtgttgcatcgccgggtgctgcggttaccgcagtagacatcagcatacctgatgccagtaatactgcggataaattagataaattgattgaatttcatttatacctttccttttgttaaaaaatccaagcaacattggtgtttttacattctgcgttaataagttatatctcacaaaaaaaaataagctgacgttggctaattccagaaggttctttagaagagtaattgagtgaataatattatatatgctgcttagtaatgtacctaaaataatccaaagccgcaataagtgagtttatactcacatataacacactgataatgataaaatttatttttacgtggagttgtaagaggggcaataaaacataaatcacatgaataatattaatgcattcataataaattaatattatttgaaataacaaaataccaaaaacattatcatcaatcgttatttaatatatattaatggtatatattaaatagaataacatacatcaaagttattgtttattgtgtatagaaataccgtgagttccactctgtattacttcagcggaacacacggtatttagccgtatttgaacttacaatctcaccggatcaatatgccagatatgatcggcgtactctttgatcgtacggtcagaagagaagtagcccatattggcaatgttcagcatcgcttttgcggtccactcttcctgacgctcgtagagttcgtcgactttatcctgacaatcgacataactgcgataatccgccagtacctggtagtgatcgccgaagttgatcagcgaatcaaccagatcgcgatagcgacccggatcttccggactgaatacaccgctgccgatttgcgtcagcacctgatgcagctcctcatctttctcgtagtattcacgcggtttgtagccctgacgacgcagttcttccacttcttccgctgtgttaccaaagataaagatattgtcagcaccgacatgatccagcatctcgacattcgcaccgtccagcgtaccgatagtcagcgcgccgttaagcgcaaacttcatgttactggtgccggaagcttccgtccccgccagcgaaatctgttcagacagatcggccgccggaatgatcaactgcgccaggctaacactgtagttcgggatgaacacgactttcagcttgtcgccaatctgcggatcgttgttgatcactttcgctacgtcattgatcaaatgaataatgtgcttcgccatgtaataggccgaagccgccttaccgccaaaaatattcacgcgcggtacccacttcgcatccgggtcggccttgatgcggttatagcgggtgatcacgtgcaacacattcatcaattgacgtttgtattcgtgaatacgtttgatttgcacatcgaacagcgctttcggatttaccaccacattcagctgctgggcgatatactccgccagacgctttttgttctccagcttcgcctgatgcaccgcgtgattaaccattgggaaatcacagtgttgttgcagatcattaagcaggctaaggtcggtgcgccagttgcggcccaagtgttcgtccaacacggctgaaagcgatgggttcgctaccgccagccagcgacgcggcgtcacaccgttggtgacgttggtgaaacgacccgggaagattttcgcaaagtcggcaaatagcgattgcaccatcaggttagagtgcagctccgatacaccgttaactttgtggctcaccacaaccgccagccaggccatacgcacacgacgaccgttggattcatcaatgatcgacgcccgtcccagcagatcggtatcgttcggatactgttcctgcaaggttttcaggaaatagtcgttgatttcaaagatgatctgcaggtgacgcggcagaattttacccagcatatcgactggccaggtttccagcgcctcgctcattagcgtgtggttggtgtaggagaagacctgacaacacacttcaaacgcgtcgtcccagctaaattggtgctcatcgattccgccccaccaaattgtgttgcatcgccgggtgctgcggttaccgcagtagacatcagcatacctgatgccagtaatactgcggataaattagataaattgaatttcatttatacctttccttttgttaaaaaatccaagcaacattggtgtttttacattctgcgttaataagttatatctcacaaaaaaaaataagctgacgttggctaattccagaaggttctttagaagagtaattgagtgaataatattatatatgctgcttagtaatgtacctaaaataatccaaagccgcaataagtgagtttatactcacatataacacactgataatgataaaatttatttttacgtggagttgtaagaggggcaataaaacataaatcacatgaataatattaatgcattcataataaattaatattatttgaaataacaaaataccaaaaacattatcatcaatcgttatttaatatatattaatggtatatattaaatagaataacatacatcaaagttattgtttattgtgtatagaaataccgtgagttccactctgtattacttcagcggaacacacggtatttagccgtatttgaacttacaatctcaccggatcaatatgccagatatgatcggcgtactctttgatcgtacggtcagaagagaagtagcccatattggcaatgttcagcatcgcttttgcggtccactcttcctgacgctcgtagagttcgtcgactttatcctgacaatcgacataactgcgataatccgccagtacctggtagtgatcgccgaagttgatcagcgaatcaaccagatcgcgatagcgacccggatcttccggactgaatacaccgctgccgatttgcgtcagcacctgatgcagctcctcatctttctcgtagtattcacgcggtttgtagccctgacgacgcagttcttccacttcttccgctgtgttaccaaagataaagatattgtcagcaccgacatgatccagcatctcgacattcgcaccgtccagcgtaccgatagtcagcgcgccgttaagcgcaaacttcatgttactggtgccggaagcttccgtccccgccagcgaaatctgttcagacagatcggccgccggaatgatcaactgcgccaggctaacactgtagttcgggatgaacacgactttcagcttgtcgccaatctgcggatcgttgttgatcactttcgctacgtcattgatcaaatgaataatgtgcttcgccatgtaataggccgaagccgccttaccgccaaaaatattcacgcgcggtacccacttcgcatccgggtcggccttgatgcggttatagcgggtgatcacgtgcaacacattcatcaattgacgtttgtattcgtgaatacgtttgatttgcacatcgaacagcgctttcggatttaccaccacattcagctgctgggcgatatactccgccagacgctttttgttctccagcttcgcctgatgcaccgcgtgattaaccattgggaaatcacagtgttgttgcagatcattaagcaggctaaggtcggtgcgccagttgcggcccaagtgttcgtccaacacggctgaaagcgatgggttcgctaccgccagccagcgacgcggcgtcacaccgttggtgacgttggtgaaacgacccgggaagattttcgcaaagtcggcaaatagcgattgcaccatcaggttagagtgcagctccgatacaccgttaactttgtggctcaccacaaccgccagccaggccatacgcacacgacgaccgttggattcatcaatgatcgacgcccgtcccagcagatcggtatcgttcggatactgttcctgcaaggttttcaggaaatagtcgttgatttcaaagatgatctgcaggtgacgcggcagaattttacccagcatatcgactggccaggtttccagcgcctcgctcattagcgtgtggttggtgtaggagaagacctgacaacacacttcaaacgcgtcgtcccagctaaattggtgctcatcgattttttacattctgcgttaataagttatatctcacaaaaaaaaataagctgacgttggctaattccagaaggttctttagaagagtaattgagtgaataatattatatatgctgcttagtaatgtacctaaaataatccaaagccgcaataagtgagtttatactcacatataacacactgataatgataaaatttatttttacgtggagttgtaagaggggcaataaaacataaatcacatgaataatattaatgcattcataataaattaatattatttgaaataacaaaataccaaaaacattatcatcaatcgttatttaatatatattaatggtatatattaaatagaataacatacatcaaagttattgtttattgtgtatagaaataccgtgagttccactctgtattacttcagcggaacacacggtatttagccgtatttgaacttacaatctcaccggatcaatatgccagatatgatcggcgtactctttgatcgtacggtcagaagagaagtagcccatattggcaatgttcagcatcgcttttgcggtccactcttcctgacgctcgtagagttcgtcgactttatcctgacaatcgacataactgcgataatccgccagtacctggtagtgatcgccgaagttgatcagcgaatcaaccagatcgcgatagcgacccggatcttccggactgaatacaccgctgccgatttgcgtcagcacctgatgcagctcctcatctttctcgtagtattcacgcggtttgtagccctgacgacgcagttcttccacttcttccgctgtgttaccaaagataaagatattgtcagcaccgacatgatccagcatctcgacattcgcaccgtccagcgtaccgatagtcagcgcgccgttaagcgcaaacttcatgttactggtgccggaagcttccgtccccgccagcgaaatctgttcagacagatcggccgccggaatgatcaactgcgccaggctaacactgtagttcgggatgaacacgactttcagcttgtcgccaatctgcggatcgttgttgatcactttcgctacgtcattgatcaaatgaataatgtgcttcgccatgtaataggccgaagccgccttaccgccaaaaatattcacgcgcggtacccacttcgcatccgggtcggccttgatgcggttatagcgggtgatcacgtgcaacacattcatcaattgacgtttgtattcgtgaatacgtttgatttgcacatcgaacagcgctttcggatttaccaccacattcagctgctgggcgatatactccgccagacgctttttgttctccagcttcgcctgatgcaccgcgtgattaaccattgggaaatcacagtgttgttgcagatcattaagcaggctaaggtcggtgcgccagttgcggcccaagtgttcgtccaacacggctgaaagcgatgggttcgctaccgccagccagcgacgcggcgtcacaccgttggtgacgttggtgaaacgacccgggaagattttcgcaaagtcggcaaatagcgattgcaccatcaggttagagtgcagctccgatacaccgttaactttgtggctcaccacaaccgccagccaggccatacgcacacgacgaccgttggattcatcaatgatcgacgcccgtcccagcagatcggtatcgttcggatactgttcctgcaaggttttcaggaaatagtcgttgatttcaaagatgatctgcaggtgacgcggcagaattttacccagcatatcgactggccaggtttccagcgcctcgctcattagcgtgtggttggtgtaggagaagacctgacaacacacttcaaacgcgtcgtcccagctaaattggtgctcatcgatcagcagacgcatcatctcaggaatcgacagcaccggatgagtatcgttgaggtgaatcgcaattttatccgccaggttatcgtaggttttatgcaactgataatggcggcttaaaatgtcctgaatggtcgaggaaaccaggaagtattcctgacgcagtcgtagctcacgcccggagtaggtggagtcgtccggatacagtacgcgagatacgttctcggagtggtttttatcttccactgccgcgaagtagtcgccctggttgaatttaccgaggttaatttcgctactggcttgggcactccacaaacgcaacgtgttggtcgcgtcggtgtcgtaacctgggattatctgatcgtaagctactcccagaatctcttcggtttcaatccagcgcgtttttttaccttcctgctgaatgcgaccgccaaaacggactttatagcgcgtgttgtggcgtttgaattcccacgggttaccgtattccagccagtagtcaggcgactctttctggctaccgttaacgatgttctgcttgaacataccgtagtcatagcggatgccgtaaccgcgccccggcaaccctaacgtcgccagagaatcgaggaagcaagccgccagacggcccaggccaccgttaccgaggcccgggtcattttcttcatcaatcagctcttcgagatttaatcccatcgcttccagtgcgccctgtacatcttcgtaaattcctagcgacaacatggcgttggaaagcgtacggccaatcaaaaactccatcgacaggtagtaaacctgacgagtttcttgcgacaactgggcacggtttgagcgtaaccagcgctccacgagacgatcgcgcacagcaaataacgttgcgttcagccattcatgtttattggcgacgaccggatccttgccaatcgtaaacatcagcttgtaagcgatagagtgcttaagagcttctacgctaagcgtgggcgatgaatatgtaaacggagcattcatataggcgtttcctgaaaactatttcaagcgatagtaaagctcacggtacgacttcgccgcgacctgccagctaaaatccattgccatagcctgacgttgcacaaaccgccacagtgaaggacgggaccacagtacaaaagcacgtcgaatagcccgtaacagcgaccaggcattactatcttcaaagacaaacccactggcgacgccatctgcaaggttctcaagagaacagtcagaaaccgtatcagcaagcccaccggtgcgccgcactaacggcagcgtaccgtacttcaatccataaagttgcgttaagccgcacggttcaaaacggctgggcaccagaatgacgtccgcgccgcccataatgcgatgcgaaaatgcttcgtgatagccaatctgaacgcccacctggccggggtattccgctgccgccgcaaggaaaccttcctgcagcaccggatcgcccgcgccgagtagcgccagctgcccgccctgctccagaagaccaggtaaggcttccagcaccaggtcgagacctttctggctggtaagacggctcaccactgcaaaaagcggcactttatcgtcaaccttaagccccattgcgatttgtaactggcgcttattttccgctttatcttccaacgtatcgcgggtgtaacgcgaggccaacagtaagtccgtctctggactccagattttctcgtccacgccgttcagtacgccggaaagacgcccttcacggtgacgctgttgcaacagaccttccataccgtaggcaaactgcggttcggtgatctcgcgagcgtaggttgggctgactgccgtaatgtgatcggcatagtacagaccggccttcaggaaagagatttgtccgttgaattccagcccatgaatattaaagaatgaccatggcaattggatgtcattcatgtgatgtgcataaaacatgccttgataggccaggttgtgcacagtaaacaccgacttcgccggacgcccgcgcgccgccagatacgcaggcgcaaggcctgcatgccagtcgtgcgcatgcaccacatcaggacgccagaatgggtcaagcccgctggccatttctgccccaacccaccccagcagcgcaaaacgcaatacgttgtcggtataggcaaataagttggtatcgtgatacgggcttcccggacgatcatagagatgcggcgcgtcaatcaggtatatgccaaccccgttgtaatgaccgaacaacagcgtgatatgtccggcgaaggtatcacgacgggatactacctgcgcatcggtcacgccacggcgaatatcgggaaatgcaggcaacagtacgcgagcgtcaacgccgtctgcgatttgtgctgcgggtaatgccccaataacatcagccagaccgccggttttaagcagcgggaacatctctgaacatacatgtaaaacctgcattatcgctcctgtttatgccctaacttccgtagcatttcgcgcgttaccagcacgatgccttcttctgaacgatagaaacgacgtgcatcttcctctgcgttttcaccaatcaccatgccttccggaataacacaagcacgatcgatgacgcagcggcgcagacggcacgagcgacctacccatacttccggtaacaatacggcggaatcaatgttgcagaatgaattcacgcgaacgcgcgagaacagaacggactgcaccaccaccgaaccggagatcacacaaccgccggataccagtgagttaagggtcatcccgtggctaccggagcgatcctgcacgaatttcgctggcggtaatgattcattgtaggtgcgaattggccaattgcgatcgtacatatccagttccggcaccacagaggccagatcgaggttcgctttccagtaagcttccagcgtacccacatcgcgccagtacggctcggcatccgggtcggattgtacgcaagagagcgggaacgggtgcgcataggccagaccggcttcggtgatcttgggaatcaaatctttgccaaagtcgtggctggagttctcatcgcgatcgtcttcttccagcagttcatacagatagtcggcgtcaaagacgtaaatacccatactcgccagagatttgctcggatcgttcggcattgacggcgggttagctggtttttcaacgaattcgataattttatcgttctcatcaaccgccataacgccaaacgcggaggcttcttcaatcggtactggcatacaagcaacggtgcaacgtgcgcctttttcgacgtggtcgataagcatacgcgagtagtcttgcttgtagatatggtcgcccgccaggatcaccacgtattccgctttataacggcggataatgtcgaggttttgggtgaccgcatctgcggtgccgcgataccagttttcccctttcattctctgctgtgctggcagcagatcgacaaactcgttcatttcttcattgaagaatgaccagccgcgctggatgtgctgcaccagagtgtgggactggtactgggtgatcacgcccatacgacggatcccggagttgatgcagttagacagcgcaaagtcgataatgcggaacttaccgccgaagtgtacggccggttttgctcgcttattggttaaatccttcaggcgggtaccacgtcctcccgccagtatcagggcaacagatttcaatggcagctggcgcgccaacattaagtgatcgttcttctctaaactaaccatgactaactccttttttatcatctctggaacacacacaatccgtgtgcaggtccctgccagacagccgtaatcactgggttatcctctccagcgaatgggggaatggcgtgccactccccagcaggtaaaacaatctctgttacctcaagcgtggcgttaattgcgatcaaaaagcgatccgagagcagaatttgcagctgtttcggcccgttttgccactcatccgtgcttaaaggttgagcatatcgatttagccaacggacattgccgtcgccttcttcccaccagcgattctccatcaaagcgggaatgcgcttgcgcagatggattaacgcggcggtaaatgcggttaaaccactgcttgcctgcgaccagtccaaccaggttaattggttatcctgacagtaggcattgttattgccatgctggctgtgaccatgttcgtcaccggccagtaacatcggcgtaccctgggagagcaacaacgttgttaacagggcgtgaatgctgtcgcgccgccgttcaaccagatcaagagtaccgcctaacccttctttaccatgattgttactgtaattgttgttggtcccgtcgcgattttcttctccgtttgcttcattgtgtttatggttgaagcaaacgcagtcgcgaagcgtaaaaccgtcatgcgcggtgacgagattaatcgcggcactcggcagacgatcattacgtttaaaaacatcgctggaggcagcaaaacgcccggcaaacactcccagaggtaaatcataatgcagccagaaacgacgggctgcatcgcggaaatgatcgttccactcggcaaacagcggcgggaaatttcccacctgataaccaccaggagcgatatcccacggttcagcaattaacttcacctgcgagagcaccgggcagttctggatagcggtaaacaacggcgcatcctgacgaaactctggcgtacggcccatgactgccgccagatcaaagcggaaaccatcgacgtggcaggtttctacccaataacgcaggcaggcgctggcataatctaccaccgccggatgactcaaattgagcgtgttaccacaaccggtccagttgtgataatcgccgtcttctcttatccaataatagctacggttgtcgatcccacgcagcgagaataacgggccgtcgaggtccagttccgcactatggttgagcacgatatcaagaatgacttcgatacccgctttatgcagtgctttgattgcatcgcgaaactcatccagcgccgtttctggcgagcaggcatacgccggatgcagcgcaaacatcgccaccgggttgtacccccagtagttactaagccccatgcgttgcagacgtggttcgctggcaaattgtgccaccggcagcaactccagcgcggtaatgcccaactgtttcaaatagttgatcatcaccggatgccccagggctttataagtgccacggatctcgaccggaatctccgggtgcaggtacgttaatcctttgacatgggcttcataaatgatggtgctgccccacggcgtgcgcggcggggcatcatcttcccagtcatagtgatcaaccaccactacgcatttcggcgcaatggaggcgttgtcgcgatagtcaggttcattatgaccggcgtgcagcagcgggttatctttaaactccccgtcaatttgccgcgcgcaaggatcaatcaacaacttcgccgggttaaagcgatgcccctcggcgggttgccaggggccatgaacgcgataaccataacgcaaacccgggcgcgcatccggcagataaccgtgccaaatgtcgccactgtgccctggcaagtcatagcgatgttcctggccattggcatcaaagacacacagctctacccgctcggcatgagcggagaaaagtgtgaagttgacgccctgaccgtcgtaatgcgcgccgaggggagtgggtttgccaatggcgagttgtgtcattctgcctcccgaaccagccagatagtggccagaggtggtagcgtcaggctcagtgaatgctgacgaccgtggctggcaatctcatcgctgtgtactgcgccgccattgcctgcattactgccgtgatagtgcatggaatcggtattgaggatttcacgccatttacccggctggttaataccgaagcgataatcatgacgcggcaccggtgtaaagttactggcaacgatgatttcgttaccctctttatcgcgacgcacaaagatcagcaccgagcgttctttgtcatccaccaccagccattcaaagccgtacgggtcaaaatccagttcatgcattgctttatggtggcggtaggtgtggttcagatcgcgcaccagacgctggacaccgtggtgccagttatcgccgccttccaacagatgccagtcgaggctggcgtcatggttccactcgcggccctgggcaaattcgttccccatgaacagtagtttcttgcccgggaatgcccacatccagccgtagtaggcgcgcaggttagcgaatttctgccatgcgtcgcccggcatccggtcgagaatcgattttttaccgtggaccacttcatcatgcgacaacggcaggacgaagttttcagtgtagttgtagagcatcccgaaggtcagtttatcgtgatgatactgacgataaatcgggtcgagcttcatgtagtccagggtgtcatgcatccagccgaggttccacttgtaccagaagcccagaccgcccatatcctgcggacgagaaacgccagggaaatcggtagactcctccgccattgtcactgcaccggaaacctgctcaccaagaatacggttggtattacgcaagaattcaatcgcttcaagattctcgcgaccgccaaattcgttcgggatccactccccctctttacggctgtagtcgcgataaatcattgacgccaccgcatcgacgcgcagcgcatcaataccaaaacgttcaatccagtaaagtgcgttaccgacaaggaagttactgacttcgcggcgaccatagttgtagatcagcgtgttccagtcctgatgatagccttcgcgcggatcgctgtgttcatacaagttcgtgccatcaaattcggcaagcgcaaagtcatcggtcgggaagtggcctggcacccagtcgagaatcacgttcagaccagctgcgtgtgcggcatcaatgaaataacggaagtcgtcgcgagtaccaaaacggcgggtcggtgcatacaggccggttggctgataaccccaactgccatcgaagggatgctcgttaataggcagtagctcgagatgggtaaagcccatccatttagcataaggcaccagttgatcggccagctcgcggtagctcaaccagaaattgttgtcggtgtggcgacgccaggagccaaggtgaacttcataaatagagattggcgcatcaaactgattcgcttttttgcgctcttcagtctgcacaaccttttccggcaggctgcaaataagagacgcggtttccgggcgcatttgcgcttcgaaggcataagggtcggacttcaggcgcaagttgccattggcatcaatcatctcgtatttatagagctgaccgttatgcgccccggggataaacagttcccagattccgctctctttacgcagtcgcatcggatgacggcgaccgtcccagtagttgaattgcccaaccaccgagacccgacgggcgtttggagcccagacagaaaaacgcgtacctgtgacgccatccatagtatctgcatgcgcgcctaaggtttcatacggacgtaggtgagtaccttcagataatagccaggcatccatttcctggattagcgggccaaaacggtaaggatcatcaatcaggttttgctgaccatgccagacaacagccaactgatagcggaaaaaattcttacgtcgcggaatgacaccgctaaagaatccccgtgagtcgagacactccagttttgcgagtttgcgcccggttttcggttcaatcacccacacatcggtagcgtcgggtaaaagggcacggacttccagtcccgcggtggttttatgcatccccagtacggaaaaaggatccgcaaaatggcctgcaattagcgcgttaatcacgtctctatcgatacgatcggacatgcttgtcttcctgttttattgtgtcaccccatccaactgaatttttgacttctggttgtgacatttttttgacctgaacggcgcagcactctgtgcatcctctctgcgtcgtcctcacttcaggtaaggctgtgaatactcgtgtattccgccacccttaaagaatagccaatgctctatttaactcccggtaaatcatgaaacatctgcgcttactcctgtattacgcactagcaggggcggcatcgcgccccagatttaatgaataaagattacgccagttgacgaagcatccgacgcagcggctccgcggccccccacagcagctggtcgcccacggtaaaggctgacaggaactctggtcccatattcagcttacgcagacggcctaccggcgtggtcagcgtgccggtaacggcagctggggttagctcacgcatagtgatttcccgatcgtttggaacaactttcgcccacggattgtgcgcagccagcagttcttccacggtcggaatagacacatcttttttcaatttaatagtgaatgcctggctgtggcagcgcaatgccccgacacgcacacataaaccatctaccggaattacggaagatgtgttgaggatcttgttggtttccgcctgccctttccactcttcgcggctctgaccgttatcaagctgtttgtcgatccacggaatcaggctacccgccagcggcacgccaaagttatctaccggcagctcaccgctacgggttaaggttgtgactttgcgttcgatatcgagaatagcagaggacgggttcgcgagttcatctgccacatggccatacagatggcccatttgggttaataactcacgcatatgtcgcgcaccaccgccggaagcggcctggtaggttgcaacggacacccaatcaacaagatcattggcgaataaaccacccagcgacatcaacatcaggcttacggtacagttaccgccaacaaaagtcctgatgccattatttaatccgtcggtaatgacgtcctgattgacggggtcaagaatgatgatggcgtcatctttcatgcgcagagatgatgctgcgtcaatccagtaaccttgccatccgctttcacgaagctttggatagatttcgttggtataatcgccgccctgacaggtcacaatgatatcgagggcctttagcgcctccagatcaaaggcatcctgaagtgtgccagtggttccgccaaaagacggcgcagcctgaccaagctgagaagtagaaaagaagacagggcgaatggcgtcgaagtcgcgctcttcaaccatgcgttgcatgagaacggagccgaccataccgcgccagccgataaaaccaacatttttcataagcgttttttcctgcaaagatgtgtgctgtataaatgtgccggtctcctcctggcacatctttcaccatacaaaaagcagccaaagtcgcaagtgaaattaatcaatgatagcgaagccatcagtaatgcgacttatcctgctttgttagcacgcagaaagtccgcggcaattatcagggaatttgagttatgaatgaaatcatttctgcaacagttttattgatcctgattatggatccgctcggaaacctacctattttcatgtccgtactgaaacatactgaaccgaaaagacggcgggcaatcatggtgcgagagttgcttattgctctccttgtgatgctggtgttcctgtttgcgggcgagaaaattctggcatttcttagcctgcgggcagaaaccgtctccatttctggcggcatcattctgtttctgatcgccattaagatgattttccccagcgcttcaggaaatagcagcgggcttccggcaggtgaagagccatttatcgtgccgttggcaattccgctggtcgccgggccgactattctcgccacgctgatgttgttgtctcatcagtacccgaatcagatgggacatctggtgattgctctgctgctggcctggggcggcacctttgtcatcctgctacagtcttcgctatttttacgtctgctgggcgagaaaggggtgaacgcacttgaacgcctgatgggattgattctggtgatgatggcaactcagatgttcctcgacggcattcgaatgtggatgaaggggtaaggttcaaacaggtgttgcacacaaccagacgcggcacctgttttattacctgaactgataatgaccttcacccaatcggataacccttccctcttcttctgcgcggttcagccacacactaatttgttcgatggttaaaccagtacaagacgccagcctttcaatacttatcgattcctttgcaaggatcgccagttccgccacaaagagttgataaaaatcgacaggggtatgcgcgggcattactgcgtaatttgcgtcatcttcgtgcagcgaaaacagttctggttgagcgttacggagtgctctgtcatacatcagcccaggaacgtctggcagtctgatcgtcacattctcagcctgttcagcactccatgacgccccattttctactaatcgtgaattggctgattgcatatcctgatttggtttaacctgcatgggcagccactgatgttttaatgcctccatcgccccggttatcgttccaccggtcattcccgcacgtacaaccattgcgctttcagcaaggcaataaatatatttattccgcgccatcgcattgccgacggtgaaacgtacctctgggtaaaacggcgaaatcaacaccaggttgcctgctataagcccttcacgccatttcactaacgtactcgtttttaacaagctatcagctaatacgccaacggcagttcccccgacctccagagccgaggccattgcacattcatcaatacctcgcgcactaccagagataacgcaaatcccctgttgggccagtttcgcggccagttgttgggtatagcgcaaatcgtcagtcggagcatctcgcgagccaacaatcgccataccttccgcttgcagtaatgctttattcccgcagccaaataaaacgggaggtgcatccgttcgcaatcggtttttcaagcgaacgggataatcggcatctccgcgggttaagatccataaaccggcgcgttgccacttatctaccgccaacgccagactatgaccacgcgccagcaagccaagaatacgctcctgagaaatacgcggatcgctccagcctgtaagtttctcttgcggttgcggcaccagaagctcggcgggactgatacgttggtgcttcagccataatgcaaacttcccccattcactattactaagaggtttatactcactcgccgccgcgcgagaaaaatcgctggttagcaggagagttgcttgtgcattggctgaaagattcatcaattttttaccgaggtagaagcaagggcaagaggataaaccgtcgggcaacctgcctggcgtaacagtgctgtcagaactgtcagcgtccatgcagaatccacgatatcgtcaaccagcaacgccggacctggcatcaaaggaggggtaatcacaaacgccccgtcgagattttgacactggtgaaaacggttttgctgcattttctgcggtggattgtccacgactttttcaatggcatcaataaaaggtaagccaagtttcgccgccagtcgccgggcaaaatcaggaaccaggtcgaggtgccttaatgaaggaacgcagcatacccaggtgggttcaggatgcggattccagcgttggcgaaccatttccgcacatgcctccaccagctcatcactgaagcgccccgtttttttctcctgggctacctgctttccccacccggaatctccccaacgagaaaggattcgccccgtagatccttgtaaacccgcaggcaagttccctttaaatccgtattgcgtaaaagccccagatgccacctgtttattgagatttaatggcaggtcagcgtgtttaataaataaatttgccgcatggagtaagccgctatcaatgtcgggcgacaacagcggatgctgaagacaactgctacatttaccacaacgttcggcacttggctcatcgagtgcgcggcgcagaaattgcattttgcactctttggtcgtgatatagctttcaacgtctgccaactcactttttctctgattcatcaaatggttaattcgttcatgatcaggagaaaaactgacgatagttctgcgccataatttctcggtatacaccacaggcgatggattttcagctaccaataatttcagtgctttttctatttgcccataacgaagattcgtccgttgttcaatgcctcgtagggtaagaccgtcattctcgctaagtacgttgagtatttcatgaatttgcgcctccgcaggaaaggcgctttcacggaagaattgatgaatagcgcggtcttcaccaccacaaagcaatatgccaactgcggaatctatagcacgcccggcacgccccacctgttggtagtaaccgacaatagaccccggcatctgataatgaatgacgaaacctaaatcaggtttatcaaatcccatacctaatgccgtcgtcgcgaccagcactttgattttatttgccagcagtgcctgctccagatactccctggcagtattagaatcttccgcaccttcacaagtcacgccgctgtaataagcaaatgcactgataccatttttccttaaccactcggcgacaagttcagcatcgcgagtcgtcagggtataaacaattcccgatttggaaaactgagggataaccgttgctaaccatgccagacgggatgactgttctcctaagactaaggcatcaagcgccaaactttcgcgagccagcgttccacgctgaatcacaatgtcacccaattgctgacggatatcctcaacgacacggttattcgctgtcgcggttgtacccagaataggggtattcgcaggcagttggcgcaaaatatctaatatacgtcggtaatccgggcggaaatcgtggccccaatcagagatgcagtgcgcctcatcgaccaccagtaaaccgatgcggtcagcgactggatataaaaccgtttcaagaaaatcctgattcgccaaccgttcaggtgaaatcagcagacaatctacgccaccttgcagcaacttatcgctaatgcgctgccattcttccctgtttgtagaattcaacgtttcagccgtaatacctaaccgttcagcggcggcaacctggttacgcatcagggcaagcaaaggagagatgataattgtcgggccagcgccgtgatcgcggaagattttactggcgatgaagtacacggcacttttcccccagccggtgcgctgtacaaccagtagttttcgccgctgattaaccaccgcatctatagcttcccattgcccttccctgaaagtagcgctggtgttacttaacatccgctgtaacagcaattcagctccgtgtttctccatcatcttctccctcgtccgttaacgcagtgattagaacggataatgttccggtctttttgcgagagagatcaaaaaaatgaagacaggagaaaagagaaatgaattactgcgagcaagctcgcagtaatttgtcgcagtaattaactcaacagctggaacgcaatcatcccaacgatggcaccgacagtgccgaggatggtttccatcatggtccaggttttaagcgtttcggcttcggtcgcgccggtaaatttaccgaacaaccagaaacccgcgtcgttaacgtggctgacaacaatcgaaccaccggcaatacaaatcgacagcgccgccatttgcgcaccggagtagttcagttgttcaatgaccggcatcaccagtcccaccgccgttaaacaggcaacggtggcagaaccctgaatgatgcgcactgcagctgccagcacgaagcaggtgatggcaatcggcaggcccatgccggttaacgcttcgcccagtgccggaccgacaccagagtcaaccagcacctgtttgaacacgccgcccgcaccaatcaccagcagaatgatccccgccggttgcagcgcgtgaccgcaaatctccatcactttgtcttttggcataccctgacgcattgccagaccgtaaatcgccaccaggcaagcaaccagaatcgcggtaaacggatggccgataaactcgaaccattcgtaagcagtagagccttctggcacaaaacgcgcggcaatggttttcagccccaccagcaccagtggcaacaggatcagcgacaggctgaatccgaaggacggcattttgccttcgccgagatgcggttcgctgatgtcgtcaggaatatgcaactccacgtagcggctgatgaaattaccccacagcggcccggcaataatcattcccggaattgccgcgcacaggccaatcaggatcatccagccaaaatcggcattcatctgcgatgccagcagcattggcgctggcccaggcaccaggaacgcagccgctgccgccacgccggcgaataatgggattaccagcttcaccaggttcgtgccggtgtggcgcgccattgagaaagcaacgctaatcagcagaacaatcgccacttcaaagaacagcggtagcgcacaaaccagccccgcaaggccgatggcataatgcacgcggctgtgaccgaaggatttgagcattttgacggcaatctgatcgaccgcgccggtttcatgtaagatcttaccaaacatggctcccagggcgacaaccaccgccaggaagccgagggtgcctcccatccctttttccatcgtcgctgcgattttatcgagcggcataccagaaaaaaggccagcccccatggacaccaccattaaagccaggaaagcgtgcatacgcgccttcatgactaaaaacagcagcagtaaaacagaccctactgctgttaaaacaagcgttaatgtagtcactacttatttgccttttttaataacctcaatggtgcttgccacaacaccttccagcggttgatcaatatccaccaccagtacatcggtttcgtccgcacccggctcctgcagcgtttcaaactgcgtcaccagcatttgggttttaaagaaatggcctttgcgcgctttcaggcggctttcaatcacatcaaaatcgcctttcaggtagatgaaagagagattaggattaccttcacgcagcaagtcgcgatagtgttttttcagtgcagaacagacgatcagcgatactttattggtgcgctgcatagcaaacgcggcgtcgttcagcgcctgcaaccacggtttgcgatcgtcgtcattcagcggttcgccagacgccattttttcgatattgcagcgcggatggaggaaatcgccatcaagaaacgcggcatgaagttgatgcgccacttcactggcgaccgcagatttgccgctgcccgatacgcccatcaagacgtaaatgtggtgatcatggttagtcgtgctcaaagtggtgcccccacaatacaagaattaaaaatgttacgggtaactgttatcggtaacattgtccagccggacaatatcagaagcaatatccatccgtgccttaagtgtataagtgtgagctacttcaaatttgtaggcttaaatagatccgcccggtgacaaggtgaaacctaaatctaacattttcggtgtcacagattcgccacgaatacgcgccagcaggcgctcagcgccaatgctgcccatccgctcacgcggcgtcagcacactcgctagccgtggctccatcacctgaccaatgtcatgaccgtggaaaccggcaatcgccatatcgtcaggaactttcaaccccaaacgctgacattcaaacgccgcgccgaccgccaggtcatcattagtacagaacacgccatccagctgcggatattcccgccgcgcctggcgaatcagttcaataccggaagagtaagaagaagattgctcaaccatcacgctatacggcaccaggcctgcatccagcatcgcctgttcgtatcccttctgtttgatgatagtacgttcgtcgaggcgtgcgccgagataggcaatgtgacgatgcccgcgagcaataatggcggtggtcatctggcgtgccgcttcaaagttatcaaaaccgacggcgatatcgaggcacggcgacttactgtccatcaactccaccaccggaatccccgccacttcaatcatctttaaggtgcgtggagtgtgggtacgttcagtgaggatcaggccgtcgatattccatgagagcattgattcgaggcgttcttgctccatttccggtttataaccgtagtgcgccagcatggtttgataaccgtgcgcgtcggtgacgctttcgattccgcgtaatacttccgcgaaaacctggttggtgagagaaggtaacaggacgccaatcgcccggctggtggcgttagagagtatatcgggcgcgcgattgggaatataacccagttcatcaagagcggcggcaatcttgccgcgtagagcgacggaaacctgctccgggttgcgtaaaaaacggctgaccgtcattttggtcacgcctacacggtcagccacatcctgaagtacgggtcttttctttttcatcgtcctgaaggtacaaaagagatagattctcttagtttaacacggacgcatcagaaccttcccgattcctcaggaaggtttgtgagataaatttagactggcggtaaatcaaacagcaggatttcactgtcgctatcagcatggatggaaatcgcctgctcatcccagattgccagaccatcgctggtcgaggctttcacgccgttaatggtgacattgcctttcaccacctggatccagacgcggcgttcagcggcaatctgatgcaccgactgctcatctttcaccagcgcccaacgatacagttccatatcctgatgcactttcaatgaaccatcacgcgcatccggcgaaagcaccagttgtttgccctgcacggcatcgaagcgacgctgttcataacgcggcgtaatgccgttttcttcaggcatgatccagatctgatacagatgcagacgctcggtgctgcttgggttgtactctgagtgacgaatacccgtacccgcactcataatctggaactcgcccgccggaacctgctctttattgcccatgctgtcctgatgctcaacagtaccttccagcacgtaggtcaaaatttccatatctttatgcgggtgagtgccgaagccctgccctgcttcaatcacgtcgtcgttaatcacgcgcagcgcagagaagcccataaaattcggatcgtaatagttggcaaaagagaaagtatgccaggagtccagccagccatgatttgcatgaccgcgttcatttgctttgcgtaagtagatcatttgtattcgccccctgaatgatttcgatgggcttagtgtggacccgatccgcctgggatgatagagggtgaaaattgacccctctgttcaaaaaaattgaactattcgaggggccatcaaacttacctcgcgagagtcactgcggagggagaagcttgctcaaaaccgcgttcaaggatttccagattcgtaagaacttcagattccttgacgtaatttggcgcaccgttggtgatggtttgatacaacgcatcataaacgcgcccataatcgcccatctctggcttcatctcttctcttaccgtcacgccctcgtcattgacatactccagcacaccgaccgaatcatccgctgcgaatcctggttcgcccggcataatattagccttcaggctggtttcctgctggtcgataccgtatttaataaacgaacctttcttaccgtgaacgataaatttcggataatcgattttcaccagatggctggttttgacgatggcttttagatcgccataaaacagctgcgcttcaaaggtgtcgtccggattggctttattacgcaggctgcggatgtcataagcgacgtgatccgggcgaccgaacagagaaataatctggtccatcgtatgcacaccaaggccatagaacgcgccatcctgcggcagccccggtttggtttctgccaccgggcggtaatagtcaaaatggctttccacttcgacaatctctcccagcttgccgctttcaatcgcttttttcgctgtcaggaagcaggaatcaaagcgacgattctgatacggcgtaacgatcagccctttgcttttcgccagtgcaaacagctctttcgcctgcgcaattgtcggagtgaacggtttttcgaccagcacatttttcccggcttccagcgcgcgcttcgcgtactcgaagtggctgtccgcgtgggtgcagacgacaaccagcttaacatcgggatcgtttagcacttcgtcgagatcgctggtgaaatggatatgggaataaatgggggcctgttcttccggcttcgcatggcggcgaaaaatatgcgcgacatgccagctatccttgcggttaagtacatacggcagatggtaacgggtggtgcttttgccgaagccaataaaggcgcagttaatgaccatgatttcgtcctttttaaggtggttatttacaccttagcgcaaagcggacgtggttcctactggagtgcgcataacgaacacaagcacttcccgaggataaattgagaacgaaaggtcaaaaaaaaagccagcacccggctggctaagtaatactggaagcaatgtgagcaatgtcgtgctttcaggttctccgcgagggtcttcctgatcgcgagacaataataatcattctcattcgcacttgtccaacactttttgcaaaaaaatgcatttgactcgcatttgaaagtcaatgatgttgaaagggacatttaccccaaagaggacaaaggaatgagtgagatagtaatacgccacgcagaaacacgcgattacgaggccatcaggcagattcacgcccagccggaggtgtattacaacacgctacaggtgcctcatccttcagaacaaatgtggctggaacgactcaccgctcgccctggcatcaagcagttagtcgcctgtattgatggaatcgtcgtaggccatctcaccattgacgtgcaacaacgcccacgccgcagtcatgttgccgattttggtatctgtgtcgactcccgttggaagaaccgcggcgtcgccagcgccctgatgtgagagatgattgaaatgtgcgacaactggttgcgggtagatcgtattgagctaacggtgttcgtcgataacgcgccagcaattaaggtctataaaaaatttggctttgagattgaagggactggcaagaagtacgcgctgcgtaatggtgaatatgtcgatgcgtattatatggcgcgggtgaagtaagatagtgccctttttctgagatggaaaaagggtgtcattcaaaatcggcataccttcctttaatgtatttattttcccaataaatatatgagatttacctcataattacttcctaaagtgtaatattttattttttaatatatacgcctacaatttcctggagtaaataaataacaattaacaagcataatattgccattgataaaatagcatgccataaaaggacttttcagggatgagtaatattgtttatctgacagtaacgggagaacaacaaggaagcatctccgcaggttgtgggactactgaatctataggtaatcgctggcagagcgggcatgaggatgaaatatttacattctcactcttaaatagtattactaatacggggcttggttcacagttccatggtataacattttgtaaattaattgataaaagcactccattatttattaattccattaacaataatgaacaattatttatggaatttgacttctatcgaataaatagatttggtagatgggaaaagtattattatatacaactaagaggcgcttttttatcggctattcatcaccagatctttgaaaaccaactggatacagaaacaataactgttagttatgaatttatcctctgccaacatcttatcactaacaccgagttcagctatttggcactccctgaaaattataaccgcttgtttttaccaaattcaaaaaacaaaacaaataatggtttaaaaacgttaaacagcgaagctgttggcaggctacttgctgctggtggcgtatacaatgggaacattgaaggattcagagatactgcggaaaaactgggtggagatgcaatcaaaggctatgatcaaatactaaatgaaaaaacagcgggcatagcgatagcaacagcatctattcttttaacaaagcgttctaatgttgatacatatacagaaataaatagttacttaggcaagcttagaggccaacaaaaacttcttgatagtatagacataatagaaataatatacattaagagaccttcaaaagacttagctaacttacgaaaggagtttaataaaaatgtaagaaaaaattttcttatcaaacttgcaaaaacctccgaagcatctggaagattcaacgccgaagaccttttaagaatgagaaagggcaatgttcctctaaattataatgtacaccataaactatctctagatgatggtggtactaatgatttggaaaatttagtattaatcgaaaacgaaccatatcataaggtgtttactaacatgcaatcacgaatagctaagggaatattagtgggtgaaagcaaaatcactccctgggccattccatctggctcaatttatcctcccatgaaaaatattatggaacccacaaaatgatgactaaaacccaaataagtaaattaaaaaaaatgatgaatgatttagactatccatttgaagcaccgctcaaggaatcatttattgaaagtataatccaaataaaatttaattctaactcaactaattgcctggagaagttatgtaatgaagttagtattctctttaataatcaacctgattatcttacttttttaagagcaatggatggattcgaagttaatggattacgattatttagcctctcgattccagaaccttcagttaaaaacctttttgccgtaaatgaattttatagagataatgatgatttcataaatcctgacttacaagaacggttagtgatcggggatgatagcatttcaatatttacttatgacattaaaagtaacttttttgaaattagagataatattggcacagaaaatatattcagttcgtttagtgatttctcttcattcttaaacgaaatcatggacagttgttcataataataaaaaggtaaccaaaatcattgtaaaccatgccatctttttagagtttaccagcagtaaatttcttgatcgaaatttatcaatacaagctatagaaaaacttacaacggaactacactccttaagtgagatggaccgaagacatgtagtcgctatttaaactgaaatagctaatggcgatgatgatcttagtgacatgttgatttggttagaattttacccgaatcataagattctgatatcttaaatgagcaaatccggttcgacgttctggaaaataaatcacaaaatattagcagatacttattttgtgactataccttatccgatgaactcttttcaaaaccagcatttaataatatctttgacgaagatgaacgcgtctttgctcaatgtataacgcaggaataataatataacgctaaacaataatatttattataattatgattacttatcacgacgcattcgcgaaagcgaacaattaccttgatgatgcaaatctcccggtcgtcattactctacatggacgctttagccagggctggtatttctgtttcgaagcacgagaatttctcgaaactggagatgaggccgcgcgcttagctggtaacgcaccttttattgttgataaaggcagtggtgaaattcattctctgggaacggcaaagccactggaagaatatctacaggattatgaaataaaaaaggctaccttcggcttgccctgacaatacggccctcttcccactaagagggccgctaaccttaataccccgccgttaaatcatccaccgagcgcgggtcggatgcaccgtacagctcaccgtccggcccaatcataatgctttgtgtactgcccatcgcctctttcagcgccactttctgaccttttgcttccagcagcttgatcgtatccgggctaaaccctttttcgacacgcagctcgtccggcaaccactgatggtggaaatgcggcgcattggtcgcttcggcgacgttcattccataatcgatgctattcaccaccatttgcagcacagtggtgataatccggctaccgcctgggcttccggtgaccagccaggttttaccatccttgaccacaatggttggtgacatcgacgacagcgggcgtttattcggcccgacggcgttggcatcgccgcccaccagcccgtaaacgttcggtacgcctggttttgcggagaaatcatccatctggttattgagcaaaataccgctctcgcccgcgacaatgcccgtaccgaaggtggtgttcagcgtataggtcaccgccacggcgttaccgtctttatccactactgagtaatgggtagtttgattactctcataaggcgcaagcttgccaggacgaatttcgctggatggcttcgctttattgatatcgatttgatcggcaatagatttggcataggctttattggtcagcgcctgccacggtactttgacaaaatccgggtcgccaagatattccgagcggtcggcataggcgtatttctcagcttctgccatgatttgcatcgcgtcggcactgccaaagccgtacttctgcatatcgaagttttccagaatattgaggatttgtacgatatgaataccgccggaagatggcggtggcatggagtaaacctgatacccgcgataatcgccgcttatcggtgtgcgttcgaccgctttatatgccgctaaatcttctttgctgatcaagccaccgtttttctgcatctcctgggcaatctgttccgctatcgtgcctttgtagaattcatccgggccgttttcggcaatcatctccaggctctttgccaggttcgcctgcaccagcttgtcgccctttttcagcggttcgccctctttccagaagatagctttgctattttcgtggttcggcagcacttcactgccgtaggttttgagatcgtcagccagcgcgtcgttaacgataaaaccatcgcgtgccagtttaaacgccggttgcaccactttattcaacggcatggtgccgtatttatccagcgccaacgagaaacccgctaccgtaccgggtgtgccggaagccagatgcgaagtgagtgattttttgctgtccgggttgccctgatcatcgaggaacatatcgcgggtcgctttggcgggtgccatttcgcggaaatcgatagccgtggtattgccatttttcgagcggatcagcataaaaccaccgccgcccagattccctgcctgcggatgcgttactgccagcgcgtagcccaccgccacggcagcatcaacggcattcccgccctccttgaggatatccacccccacctgagtggcagtagcatctacagacgccaccattccctgcttagcgcgtaccggatggaagacatcttcctccacaccataagaaacaggtggcgcggctaccgtactaaaacaacttcctgtgagcagagcagcaatggccacccggcgtaaaaacgtcggttttatcatcgttattctccagagattaaggggcaaccccagctaagcctggtatataactctgaattaatcatcgttttgccgggaagcgagtaaacttaaagaatatcttcagaggaggatacgcgatgaaacgacttctgcttttgacggcactcctgccgtttgtcggctttgcacagcccattaatactctgaacaaccctaaccagccgggatatcagatccccagccagcagcggatgcaaactcaaatgcagacgcagcaaatccagcaaaaagggatgctgaaccagcaactgaaaacgcaaacgcagctgcaacagcagcatttagaaaaccagataaacaataattctcagcgggtgttgcagtcacagccgggggagcgaaatcccgcccggcagcaaatgctgcccaacaccaacggcgggatgttaaacagcaaccgtaatccggatagttcgttgaatcagcagcatattctgccggagaggagaaacggcgacatgctgaatcagcccagcacgccgcagcctgacattccgttgaaaactattgggccgtaaagttcggaccaatcacgtcaatcgcatcggtacagatgcaatccacgccccagcgcagcaactctgccgcgcgctggggtttattgacggtataaaccagaatccgtaatccggcgtctttcaactgcatcactcgcgctttatcgagtaacttatgattgagatgaagagagacgcagcccagccgcgcggtcagttctcgccagtcgtcgcgccactcatcaagcaataaaccacgcggcagttccggtgccgccagctgtgcggcttctaaagcatcaatctcaaacgatgacagcagcggcggcgtcattccggcccacagttcgcgtgccgccagcgccaccattttgcccgttaatggcccggtgccagtggtgggtttgatttcgatattcgccatcatcccgtgtttgcgacaacgttccgccacctgcgaaagcaacggcagtggctcacctttaaacgctttgctgtaccaactgcctgcatccacgcgcagtaaatcctgccagttcagatcgcccgcgacgccccagccgttgctggtgcgttcaagattgtcgtcatggagcaggaagatctcgccatctttcgataacttcgcgtcaaattcgatcatcttatgaccgtattttgccccgacgtcgattgctgccagggtgttctccggggccagtttaccgccgccacgatgggcgacgatgcggggataaggccagttactcatactcgttgtcctgtttcaccatcaaaaagatgcagctgattttccggcagatgcagccacagcgtgctgcctgccgtcgggcgctcctgatgcgccagtcgcaccaccagcttctgttcgccccaacgtccgtgcgccaggttatctgcaccgaggatctccagcgtgtccatcaccagcggcacaccaccttctgcctgcaagcttagcgctatatgttccgggcgaatgccgagggtcattttacgcccggcatactgacggtagccaccgtttagtggcagcgtaataccgccatccagttcgaaatgcgtaccttcgttattcacgcggccagccagtaggttcatcgccgggctgccgataaaactcgccacaaacaggctggcgggcttttcgtacacttcaactggcgtgccaatctgttcggcgacgccgccgttcatcaccattactcgctgggcgagcgtcatcgcctcaacctgatcgtgggtaacgtagagtgaagtcgttttcaggcgacggtgcagctgttgcagttcaagacgcatctgcacacgcaacttggcatcgaggttagagagcggctcatcaaacaggaacactgccggctcacgcacaatcgcacgccccatcgccacacgctgacgctgaccgccagatagctcacgcgggcggcgcttaagcaggccgtccagctccagaatgcgcgccgcttctttaacacgttcggcaatttgttgcttgcccatgccgcgaattttcagcccccacgccatgttctcctctacgctcatatgcggatagagcgcgtagttctggaacaccatcgcaatcccgcgatctttcggctccatttcggtgacacgcttgcggtcgatccagatatcgcccgtcgttacccgctccagtccggcaaccattcgcaataacgtcgatttcccgcagccagacggcccgaccatcacgataaattcgccatccgccacatcaagggtcagcggtttaatgacctgggttttgccatcccagcttttggttactgcctgtaatttcagtcctgccatcttatttctcactatcgaccaggccgcgcacgaaggcacgctgcatcactaaaacaatcactactggtgggatcagggttaacaacatcgccgccatcaccgagttccattccgttgtgccttcgcctgtggcgatcatccctttaatccctgccacggtggtgccgagatcaacgtcggtaataatcaacaacggccacaaatactggttccagccgtaaataaaggtaatcacaaacagcgccgccagattggttttggacagcggaaaaacgatgtcgcaaaagaaacgcattggcgacgcgccgtcgatccgcgcggcttccaccagttcatccggtagggtcataaagaactggcgaaacagaaacgtggcggtcgccgaggccatcagcggcagcgttaaacctgcgtagctgtcgagcattttcaggttggcgatgacttccaccgtcgggaagatacgcacttcaaccggcaacatcagggtgataaaaatcatccagaagaagaggttacgtagcggaaaacgaaaccagacaatggcaaatgccgagagcatcgagacggtaattttgccgagcgtaatgctgaacgccatcacaaagctgttaagcaacatccgccagaacggcgcgctattcgtgcctaccccgtttacccagatgttgtggatgttttccagcagatgtgtgccggggattagcgtcatcggtgcggcatagacttcttgtttatccagcgtcgccgcgacaaacgccacgtacagcgggaagaggatcaccgcgatcccgaggatcagcatggtatggctgaatattgtcagccacggacggttctcaatcattggtaacgtaccttgctttcaacatagcggaactgcaccaccgtcagcacgatgacgaggaacatcaacaccaccgactgcgcggcagacgaagccaaatccagtccggtaaagccttcacggtaaatcttataaatcagcgtcgtggtggcctgtactggcccgccggacgtggcggcgtcgatcaccgggaaggtgtcgaagaaggcatacaccaggttcaccaccagcaggaagaaactcaccggagcgataagcggcagcgcaatcttaaagaagcggcgaatcggccctgccccatcaatggctgcggcttcgatcaacgaacgggggatggattgcagcgcggcatagaagaacagaaagttgtagctgatttgcttccacactgaggcaaacaccaccaggaacatcgcctgaccgctgttttgcgcgtggttccagtcgtagccgaactcagcgagaaaatgggtgatcagcccgcgaccagggttaaacagaaagatccacaatacggcggcaacggcgggagccacggcatacggcagcagcatcaaggtttgatagaaacgactgccgcgcacgatgtactccaccagcgctgcgaagaacagcgataccagcaaaccgctgacggtgacaaaggtgctgaattttatcgtcgtccagaaggcgtcgagatagtagctgtcgtgaaacagcgtgacgaaattatccaggccgacaaactggctggagaaaccaaacggatcgacgctttgtagcgagtaccacaacgcttcgcccgcaggccagataaaaaagataacggtgatgatgagctgcggcgcgaccagcaaataaggcagccagcgcgagcggaacatcggacgggatgatgacattacagttaattcctgaactgtgccggatgcgcttcgcttatccggcctacacgcgatgccaggtcagataagcgaaacgcatccgacattacactgattaagacttcgtcgatttctcaaagcggcgcaataactggttcccacgctcaacggcagtatccagcgcctgctgtggtgtcttcttaccggtccacacgctctccagctcttcatccacaatcacgcggatctgcggcatgttgcccagacgcaaacctttggtgaacggcaacggtggcttgttcagcatctgacgcgtggcaatatccgctcctgggtttttctcgtaaaagccctgctcacgggtcaggtcatacgccgctttagtgattggcagatagccggttttctgatgccactcggcagcgttttctggctttgcgaggaagtcgaggaacttcgccacgccggtgtaggtttctttatctttaccctgcattacccatagactggctccgccgataatggcgttttgcggcgcgtctttcgcatcggcgtcgtaaggcatcatgcctacgccatagttaaatttggcgtactcgcgaatgttggcaagagaaccggaagaggcggtagtcatcgcgcaatcaccgttatagaacttctcggtggattcatccttacgcccaacgtagctgaaatcgcccttcttgttcatctcttcgagcatggcgatgtgtttcacctgctccggcttgttgaactcaagcaccgcgtctgtgccgtcaaagccgttgtttttgctggcaaacggcaaaccgttccaggcgctaaagttttccagttggatccatccctgccagccgctggcgtagccgcacttcataccggaggctttcagttttgcggcatagtccgccagatcctgccaggttttcggcggctgttccgggtctaatcctgctttcttgaaggcgtctttgttgtaatagagaacgggagtcgagctgttgaacggctgggagagtaagtggccggttttgctgtcggagtaatagcctgaaaccgtcggcacaaactgcgactcatcgaattgaatccctgcctctttaaatacgtcatacaccggtttaatggctttcgacgccatcatggtggcggtgccaacttcataaacctgcaaaatagccggagcgttgccggtacgaaatgcggcaatccccgcgcttaaattctgttcgtagttgcctttataggtcggtacaattttgtaatccgggttttcggcgttaaaacgttgggccagagaatccacctctttacccagttccccttccatagaatgccagaacggaatggtcgtcactgcctgcgcatttgccattaaagccagtccgagcgccagtgctgaagctgtataacgtaacggtttcattgattatctctcttgttgtaccgaatgcgcgaattcacgcgttttatgctcgcggagtaacatgacatgctcgaattacagaaaaataactattttgttacatttttaagatagtaaggtgtcagaaagatgacaaggcggtgacggcgcgggcgagggaaaatgggagatggggcacggataagcggaaaaatagaaggtctgaatcaaactctacagattactcatcgtttcatgccggatgcggcgtaaacgccttatccggcctacaagatcgtgcaaattcaatatattgcaactcacccagtaggcctgataagcgcagcgcatcaggcaattttacatttgtcacctgtctcaaaggagtcttttgactccttatcaatcaacgtgttattacccgcctaaatacgcacttctcaccgcttcattcgccagcagcgcgtcgccggtatcggagagcactacatgaccgttttccagcacgtagccgcgatccgccagctttagcgcctggttggcgttctgctcgacaaggaagatggtcatcccctgctcgcgcagttgttcgatggtgtcgaaaatttgctggatgataatcggtgccagcccgagcgatggctcatcaagcagtagcaaacgcgggttactcatcaaagcgcgaccaatcgccagcatctgctgttcaccgccagacatagtgcccgctcgctgaacacggcgctcatgcagacgcggaaacagttcatagacccactttatgcgctcctggaactggtcgcgttcggcaaaaaagccgcccatcgccaggttctcttccaccgtcatccgcgagaagacacgacgcccttccgggacaatcgctaccgcttcgcgcatgattttcgccgtctgccagtcggtaatgtctttatcatcaaacacaattcgcccgctggtggcgcgcggatcgccgcataacgtgccgagcaaggtggttttccccgccccgttcgcgccaatgagggtgacaatctcgccctgattgatatgcaggctcacctcatgcagcgcctggattttgccgtagtgggcgctgactttgtcaaaggacaacatgactttttccatcttatgcctcacctaaataggcacggatcacatccgggttattacggatctgctccggtgtaccgtttgccagcggcgtcccctgattgaccacgtaaattctgtctgaaatccccatcaccagcttcatatcatgttcaatcaacaagatagtggtgttgtgatggttacgcagttcggcaatcagctcatccagctctttcgtctctttcgggttaagacctgctgccggttcgtcgagcattaaaatctccggctgcgtcaccatacagcgggcaatctccagacgacgctggtcaccataggccaggttactcgcctgacggttggcatgttccaacaaaccaatgcgctcaagccaggtagcggcgcggtcgagcgcttcgctctgggcgcgacggaaagagggggttttcaacaggccggagaacagcccagttttcagttgctgatgctgtgccaccagcaggttttcaatcaccgtcatttcacggaacagacgtacatgctggaaggtgcgcaccacgcccatgcgggcaatttgctgccccggtaaaccttccaggtgctgatcgcgcagtaaaatggtgccgccggtgggtttatagaatccggtcaggcagttgaagaccgtggtttttccggcaccgttagggccgattaacgagacgatttcctgcgggtacagttcaagattgacgttgttcaccgccagcaggccgccgaagcgcatcatcagaccgttaacagataataatgtctgactcatgcctgctctcctttcgctgcgccgttcttcagcttgagttgcgggcgcgtcatgggcagcaagccctgcggacgccagatcatcatcagcaccatcaaaccaccaagcattaacatgctgtattcgttgaaatcacgcatcaactcgcgcgataccaccagcaaaacagccgccagaatcactgcaaattgcgagcccataccgccgagcaccactatcgccagcacaaacgccgattcggcaaaagtgaaggattccgggctgacaaagccctgacgcgcagcaaacagcgttccggcaaaaccagcaaacgcggcgctgatggtaaaggcagtcagcttgatacgacgcgggcttaagcccagcgaacggcaggcgatctcgtcttcacgcaacgcttcccacgcacggcccagcggcatccgcagcaggcggttaatgacaaacaggcttaacaccaccagcagcaacgccaccaggtagaggaagatgacgcgatcggagggatcgtatttcaggccaaagaaattactgaacgtgtcccagccgccttcgcgggcggtacggctgaactcgagtccgaagagcgtcggtttcggaatctgactgataccgttcggtccgccggtaatttcggtgttattgagcagcaatatgcgcacaatttcgccgaacccgagggtaacgatcgccagatagtcaccgcgcagacgcagcaccggaaaaccgagcaggaagcccgccgccgccgccatcaacccggcaatcggcagacaggtccagaagcccagaccgtaatagtgattgagcagcgcaaaagtgtaagcgccgatggcgtaaaagccgccgtatcccagcaccagcagaccagaaagaccaacaaccacgttcagcccgagaccgagaataatgtagatcatggtcagagtggcgatatccaccgtcccacgcgacaccataaacggccacgccaccgcaagcaccagcagcgccacgaggaacagtttctgcttcaccgtggagccatcaatcgcgggcagaataaacttcggcccggaaacgctttttagccctttctggaaagcaggccgcacaagctggaagaaaaagaccaccgccgtgccgataaacacccactgccaacggatctctgaagccgtgtcgaccaccagtttggtgccatccagctccagttgcacgcccataaagacgcccgccagcacaaagaacatagcggcagagagcagcgccattgcaatatgcatcggtttcatactttctctacctccgggcgacccagaataccggtcggcatcaccagcagcaccaggatcagcagggcgaatgagaccacatctttatattccgtactcagataggcagaagagagcgcctccgcaatccccaggatcagcccgccaatcatcgcccccggaatgctgccaatcccaccgagcaccgcagcggtaaaggctttcatcccggccataaagccgatgtaagggttaattacgccgtagaactgaccgagcagcacgcccgccactgccgccatcgccgcgccaatcacaaaggtcagcgcaatcacccggtcggtgttgatgccaagcaggctcgccattttcagatcttccgcgcaggcacggcaggcgcgccccatacgggaatagcgaatgaaaatcgtcagcgccagcatggcgaggaaagtaacaatccatatcaccgcctgcatggtggtaatagacgcagagaagttttcgctatggcccaccacccactgaccgttaaacaggctgggcagcgccacatcgcgcgaaccttcggtcaggctgacgtagttttgcaggaagatagacatgccgattgccgagatgagtgcaatcaggcgcttagagttacgcaccgggcgataggctacccgttcgatactccagccgtaggcgctggcaatgacgattgcgccgacgaatcccgccgccaccagcaaccagccggtatcaatgcccagcatcatcagtgcggcgatgatcataaaggagacgtagctgccaatcatgtaaacctcgccgtgggcgaagttgatcatgccgataatgccgtaaaccatggtgtagccgatggctatcagcgcgtaggtactgcccagcgtgacgccgttaaacatctgctgcaagaaatacaaaaactgctcagacataaggtaacctttctaaacccgcccgtttttcacgaacggtgggatgatcacttggctgccgtggatgaaccgtcggcatgccactggaagacaccaaaatcgaatcccttaagatcgcctttttcatcccagttcagcggcccaattacggtgtttgcaccgttagcttttaaatctttcaccagcgccagcggctcatcgctgccggtacgttcaagggcagttgccagagattgcaccgccgcgtaggtgatccagacatagggcccggacggatctttcttgtcggctttcagcgcatcaacgatgccctggtttgtcggatcctggtcatagcgttttggcatggtgaccaacatgccttcagcggcatcaccggcaatgttcgacagcgacgcattaccgacaccttccggccccataaactgggttttcaagccaacggaacgggcctggcgcagcatctgccccatttccgggtagtaaccgccgtagtaaacgaagtcgatgttttcttttttcaggcgggcgatcagcgcggagaaatctttctctccagcggtaatgccgtcgaagaagacgacgttggcgttagccgctttcagcccgtcctgcaccgaacgtgccagcccttcgccatactgttgtttgtcgtgaatgatggcgatgcgctggggcttcaccgtctcaagaatgtattttgccgccgttggcccctgggaagagtccagcccggcagtacgcatgatgtattgataaccgcgttgggtcagctccggattggtcgctcccggcgagatcatcagaataccttcgtcttcatagatatctgatgcaggttgggtagaggaggaacacagatgaccaataacatatttaatgccgtcgttaacgattttgttggcgaccgcaacggcttgtttcgggtcgcaggcgtcgtcatattccacgccaaccagtttatcgcccttaattccccctttggcattaatgtctttaattgcctgacgcgcgccgttaaattccatatcgccccactgggcaatcgggccggacatcgcgccgacaacggcgactttaatatcgtcagccatagcggtgtgtgaaattgtcagtgcaatcatccctgcgatgatagttttcgcattccgtttcatagtcaaaaatccccattcgtgatgttgtgttgctttgtttttatgtgttaacaaatcagactgttctttttttatactgcactgtttttacctgtctgattaagggtttagcgcagtattttgtgatgatagcgattaaaatccctatttttcagtcgattaagaacagataatattctgaatttattgatagataaacagaaaaaagcgccgttgtcagcataaaataacggtacaaagggcagaataattcactaccatttaggggattatgctggatatttttcattctctaatgttttaactttgtaattattgctgaaaaaaaattaatcacctgccaaaagaaataaaaaagagaaagcctccgattaaattatttcgctacactggttccacttttgtgatttacacgggttccccatgaagctgaccatcattcgattagaaaactttagcgaccaggaccggattgacctgcaaaagatctggccggagtattccccttcctctttacaggttgacgataactaccgtatctacgccgcgcgttttaacgagcgcctgctcgctgccgtgcgggtaaccttaagcggcaccgagggggcactggattctctacgcgtgcgggaagtcacccgacgtcgcggtgtggggcaatatctactggaagaggttttgcgtaacaatcctgacgtttcatgttggtggatggcggatgctggcgtggaagatcgcggcgtgatgacagcgtttatgcgagcactgggatttacggcacaacagggtggctgggagaagcattaatcgtcaagtttgatttcaaaagtgatattgcctgatgcgctacgcttatcaggcctacaatgtgtgctgcaatttactgatttctttgaatcttgtaggccggataaggcgtttacgccgcatccggcatgaagcaacgtactcgatattagcaatttggcggcaacccaaagttgccgattaatgattacttcgcatcagtcgccgtgccgttggcgtgccagtcaaacacaccgaactcaaagcctttcagatcgcctttctcatcccaggtcagcggccccatcaccgtatcaaccgagttcgctttcaggtatttagcgatctccgccggatcgtcagactgattcaggcccgcttgcaaagattgcagcgcggcgtaggtggtccagacgaacgcgccgcttgggtcctgttttttcgctttgatcgcgtcaacaatcggtttgttcgccggaacctgatcgtagttcttcggcttggtcaccagcagcccttctgctgattcacccgcaatgttagacagcgagacgttagccacgccttccggccccataaactgggttttcagccctgccgcacgtgcctgacgcaggatctgccccatttccgggtggtaaccgccgtagtaaacgaagtcgatattctctttcttcagacgcgccaccagcgttgagaaatctttttccccggcggtaataccatcaaagaacaccacattagcattgcctttcttcaggccgtcctgcaccgcacgcgccagaccctcgccgtattgctgtttgtcgtggacgatagcaatacgctgcggtttcactttctcaagaatatatttcgccgccgtcggcccctggtcggagtccaggccggtggtgcgcaggatcagctgatagccacgggcggtcagctccggcgcggttgccgctggggtgatcattaaaatgccttcgtcttcgtagatgtcagacgctggctgcgttgatgaagagcagaggtgaccaatcacgtatttaatgccgtcgttaacgactttgttcgccaccgcaaccgcctgtttcgggtcacaggcatcgtcatattttacgatttgcagtttgttgcctttgataccacctttagcattgatatccgcaaccgcctgctctgcgccagtaaactcctggtcaccgtactgcgccaccggaccggacattgcgcctacgacggcgactttaatatcttctgccagagccatattgctgaatgccagcgcgatacatcctgccagtaacgctttaccctttatgttcatcctgagaatccccactcttctggttattacgtgtgttgtgatgttgttgtgcagcactttatttcgttttatacgtagctacccgtgctttagcagcatactctgctaaaacataccccatttttatgatattggaatagctattttgacagtttattaacaatctgcgtggggattggcgttttgccggagggggaattgattattgtagaggcccaaaaaacaaaaaccccggactctcatccagggttctctgcttaatagcggaaattacgcttcaatggcagcgcgcaattttttcatcgcgttcttttccagctgacgcacacgctcagcggaaacaccgtaacggtcagccagttcctgcaacgtggacttgttgtcttcatccagccagcgcgcgcggatgatatcctgactacgctcgtccagaccttgcatcgcatcggtcaggcggtttgccgcctgctcttcccagttatcatcttcaataccgtcggcaaagttagatgatttatcctgcagatagagcaccggagccatcggctggctgtcggaatcgtcgtcggaagacaggtcaaaggtcatgtcctgtgccgccatacgtgattccatctcacgtacgtctttgctggttacgcccagttcacgggccaccatctcgacttcatcctggttaaaccagcccagacgctgcttggttttacgcaggttgaagaacagtttacgttgcgctttggtggtcgcaactttgacgatacgccagttacgcagaacgtattcgtggatctctgctttgatccagtgaacggcgaaggagaccaggcgcacacccacttccgggttaaaacggcgcactgctttcatcaggccgatgttaccttcctgaatcaaatccgcctgtggcaggccatagcccgcataattacgagcaatatgaacaacaaaccgcaggtgagacaggatcagcgttttagctgcttccagatcgccatggtaatgcagcttttcagccagcgcccgctcctcgtcagccgacaacatcggccacgcgttagctgcccggatgtaggaatccaggttgccaactggggctaaagctaaactttgcattttgtcagtcattcaaatcctctcaatcgatatcttctggcgcttcagtggtagcaacaactgtgccagagcttaagagcaacgaggttatcattcactgttttatcagaccgtgattttatccacaagttcaatacaacgctgtgaataaattacgcacaaaatgtgacatagagatgaaataccgggaagagacaacggggtctctttccctgctacggaacccattgcagggaaagagtataacacgcttttattattcaggcgtaaagtggcgtaaatgttgtaccgtggcaagccacgctgccacccagccaatcatcgagcataccagcagcaatagcaggcattcatcgaacgataaaccattgatatcaaacttcgttccgaaaacctgtgccacttccgcaaccgccgatgacaatcgcagcaccagaatttctgacaaaattaatgacaacaatgcgccagaaaatcccagcagtgcgccaccgtacaggaacgggcgcaggatgaaaccatccgtcgcaccaatcagtttctgcacgttaatagagtcacggcgagcaaagatgctcagacgcacactgttgccgatgacgagaaacactgctgccaccatcaacacgccgatcatcgcggaaacgcgcccgaccagcccggtcaacgccgccaggcgggcaaaccagctgtcatccatccgcacttcgtcaatgccgttaatctgcgtgatacgatcacgcagcgtattcagtgactccgtcccctgaaaatcgagtttcgggatcaccaccgccactgccggaagcgggttttcttccagcatatccagcgcaccaccaaaaccagaccagttacggaactcgcccagtgcgtcttcacgagaaagataattcactttctccacgccttgctcggcctgcaactgtgccaccacgcccgcagcggcgtcatcatccagcgttttttgcagataaacagtgatttgcggtgacggataatattgcgtcgccgcctggttaacgtttttgtacaccatataacagacgctgggcagcgtcagggagatggcgataaccatcaccgttaaaaacgtggcgaacggtttgcttttcagatcctgcaatgcgccgtggaaggcatagcgtacctgttcgttgaaaacgttggttttgcgatttaccggttttggcgaggatttcgcgcgtttcggcgcgttacgaccgccgtcgccagagccgccgaccgatttacggaagcgatccagacgcccgccaaactgccgaatgtgattgattgcatcgcgcttattcatggcccacgcctccatgcaagtgaccatcgctcagggtgagcatgcgataggaacgtcgcgaaatcaggttgatgtcgtgcgttgccatcaatacggttactccaacgcggttaaactcttcaaacagacgtaaaatgccttccgacagcgcgtcgtccaggttaccagtcggttcgtccgccagcagtaccgcgggcttgttcaccaccgcgcgggcaatgccaacacgctgttgttcaccgccggaaagctgaatagggaagttcttcgctttgtccagtagcccgactttatccagcgccgccgacacccggcgacgaatgtcatcaccgctggcaccggcgataatcagcgggatcgccacgttatcatagacagtacggtccatcagtagatggtgatcctggaaaatcatgccaatctggcggcgcagaaacggaacttcacggtttttcagacgcgtgatgtcatggccgctaaaccagattttcccggcgctgggccgctcaatcccacagatcagcttcaggagggtacttttccctgcgccggaatgaccggtcagaaacgccatctcacccggctgcatatggaacgtaacgccctgcagcgcctgtctcccaccgagataagccttgctgacatgttcaaagcgaatcattgttaatcctctcgggcaaaaagtgcctctataaagtcgtccgccttaaacggacgcaaatcctcaatacgttcgccgacaccaatgtagcggatagggataccaaactggtcagccaccgagaaaattaccccgcctttcgccgtgccgtccagtttcgttagcgtgatgccggttaagccaacggcttcgtggaacagtttggcctggcttaccgcattctgcccggtgctggcatcaatagtcagcataacttcatgcggagcttcaacgtcgagtttcttcatcacgcggacgattttcttcaactcttccatcaggtgcgatttgttttgcaggcgtccggcggtatcggcaatcaggacgtcgatgttacgcgctttagcggcctgaatggcgtcgaagataacagaagcggaatcagcaccggtatgctgggcaatcaccggaatattgttgcgctgaccccagacctgaagctgttcaaccgctgccgcacggaaagtatcgcctgccgccagcatcaccgatttaccctgctgctcaaactgacgcgccagcttaccaatcgtcgtggttttacccacaccgttgacgcccaccatcaggatcacgaacggcgttttaccttcaacattcagcggctcatcgactttcgccagaatctcgcccatctcttctttcagcaggccatagagcgcctcggcatcacgaagctgcttgcgggatgcgccttctgtcagattggtgataattttacgagtggtttccacgcccacatcggcgatcaacagctgttcttccagctcttcaaacagatcatcgtcgatttttttaccgcggaacaggctgataaatccggaaccgagattttctttggtttttaacaggctgcgtttcaggcgcgcgaagaaaccttctttggtcggtttttcctgctcctgagcgatttcttccaccggctgatcttcttctgccggagaaaccaccattaccgcctcttctgccacttcggcagccagcgcctgtgcctccggctcttcgtcggtgatttcttctttagccgcttcttcttccgccgcttcgacaatctctacggtttccgcttcggcctgccactcttctggcgaaaccgcttcggcgttgacgtcttccgacaacggcagttcttcacgttcgatagccactggctccggcgtttcttctacgaccggttccggctgtgcaacgacttccgcttcaggctgcgctttttcactttcagcaacctgttcagtaacttccacaacgtcggcagcaaaagtttccgccttggcttcagtatgcgcctgcggctgctcttcaacggcgtgttcagaagccttcacaggctcttgcgcctgaacgatttcttctacaactggttgttcattctgaacttctgtctctttttccggggtctgctctttttgaccaaagcccagccaggaaaaaaagccacgttttttttctttcgccatttgcgactacactcctcgctgttgcttcatggcacagcgttaacgctatgtacatagcagctaaaaaaatgatgaaatagtctatcacttaacttaattcacatcaccgcctgcaagtatgtgttatctggcggattgagcaatttatcatgaaaaaaccgaatcattccggcagcggccaaatccgcattattggcgggcagtggcgaggccgtaaactcccggttcctgatagtccaggtctgcgccccaccaccgaccgcgtacgcgaaacgttgtttaactggctggctccggtcattgttgacgcccaatgtctggattgcttcgccgggagcggcgcgctggggctggaagcgttatcgcgctacgctgcgggggccacgttgattgagatggatcgtgcggtttctcagcagttaattaagaatctggcgacactaaaagcaggcaatgcacgcgtggtgaacagcaacgcgatgtcattcctggcgcaaaaaggcacaccgcataatatcgtgtttgtcgatccaccgttccgccgtggcttgttagaagagacgataaatttactggaagataacggctggctggctgacgaagccctgatttatgtcgaaagcgaagtcgaaaacggtctgcccactgttccggcaaactggtcattacatcgggaaaaagtggcgggtcaggtggcttatcggctgtatcaacgcgaagcacaaggagaaagtgatgctgattaatattggtcgtttgttaatgctctgcgtttggggatttttaatcctcaacctggtgcatcccttcccacgcccgctgaatattttcgttaacgtggcgctgatttttaccgtgctgatgcatggtatgcagctggcgctattgaaatccactttaccgaaagatggcccgcagatgaccaccgccgaaaaggtgcggattttccttttcggcgtgtttgaactgctggtctggcagaagaaatttaaagttaaaaaataaccttattgttcgcctacaaagctgacaaagcgcgttcctttatagctcagcgtacctttatcacccactgtcagggcgtggtactgctgggcgtcgaggcgaaacgtctgctccattcctccgctttgcggtttgaagcttgcctcatagcgcatactggtgcctgccggagtcacttcctgctggcgcgaacggcgatcgttaatcggtttttcccgcttgttgctcaccaccaccagcttttgctggagcggtgccatatcattatcagctttttcccgtcgttgttgcataaaacgaaacgatgcggcgacgatgattaagccaatgataacaataaagaaaagaggtggtttactcatctttatccctcatcggaaaatgcggaaataagcataccctgccagttatggtgttgtcatccgtccaccctcgccactaaactggaagcaagaccgtaggcattccgcttacgaaaaaataacgaattcaaggaactaagatgctttggtcgtttatcgctgtctgtctttccgcatggctatctgtggatgcatcgtatcgtgggccaacctggcaacgctgggtgtttaaaccgttaacccttcttctcctgctgttgctggcctggcaagcgccgatgttcgacgccattagctatctggtgctggcggggctgtgtgcctcactgctgggcgatgcgctaaccctgttgccacgtcaacgtctgatgtacgccatcggcgcgtttttcctctcgcacctgctgtacaccatctatttcgccagtcagatgacgctctctttcttctggcctctgccgttggtgctgctggttctgggcgcgctgttactggcgattatctggacgcgtctggaagagtatcgttggcctatctgcacgtttatcggcatgacgctggtgatggtgtggctggcaggtgaactgtggttcttccgtccgaccgctccggcgctctctgcgtttgtcggcgcttcgttgctgtttatcagtaactttgtctggctgggtagtcactatcgccgacgcttccgtgcggataacgccattgccgcggcctgctactttgctggtcacttcctcatcgtccgctcgctgtatctctgataaaacttgactctggagtcgactccagagtgtatccttcggttaatgagaaaaaacttaaccggaggatgccatgtcgactcctgacaatcacggcaagaaagcccctcaatttgctgcgttcaaaccgctaactacggtacagaacaccaacgactgttgctgcggcggcgcatgttccagcacgccaactctctctgaaaacgtctccggcacccgctatagctggaaagtcagcggtatggactgcgccgcctgtgcgcgcaaagtggaaaatgccgtgcgccagcttgcaggcgtgaatcaggtacaggtgttgttcgccaccgaaaaactggtggtggatgccgacaatgacatccgggcacaagttgaatctgcggtgcaaaaagcgggctattccctgcgcgatgaacaggcctccgacgaaccacaagaatcacgcctgaaagagaatctgccgctgattacgcttatcgtgatgatggcaatcagttgggggctggagcagttcaatcatccgtttggtcaactggcgtttatcgcgaccacgctggttgggctgtacccaattgctcgtcaggcattacggctgatcaaatctggcagctacttcgccattgaaaccttaatgagcgtagccgctattggtgcgctgtttattggcgcaacggctgaagctgcgatggtgttgctgctgtttttgattggtgaacgactggaaggctgggccgccagtcgcgcgcgtcaaggggtcagcgcgttaatggcgctgaagccagaaaccgccacgcgtctgcgtaacggtgagcgtgaagaggtggcaataaacagcctgcggcctggcgatgtgattgaagttgcggcaggtgggcgtttgcctgccgacggtaaactgctctcaccgtttgccagttttgatgaaagtgccctgaccggagaatccattcctgtggagcgcgcgacgggcgataaagttcctgcaggcaccaccagcgtagaccgtctggtaacgctggaagtgctgtcagaaccgggtgccagcgccattgaccggattctgaaactgattgaagaagccgaagagcgccgcgcacctattgagcggtttatcgaccgtttcagccgtatttacacgccagcgattatggccgtcgccctgctggtaacgctggtgccgccgctgctgtttgccgccagctggcaggagtggatttataaagggctgacactgctgctgattggttgcccgtgtgctttagttatctccacgcccgcggcgattacctccgggctggcggcagcagcgcgtcgtggggcgttgattaaaggcggcgcggcgctggagcagctgggtcgtgttacccaggtggcgtttgataaaaccggtacgctgaccgtcggtaaaccgcgcgttaccgcgattcatccggcaacgggtattagtgaatctgaactgctgacactggcggcggcggtcgagcaaggcgcgacgcatccactggcacaggccattgtgcgcgaagcacaggttgctgaactcgccattcccaccgcccaatcacagcgggcgctggtcgggtctggcattgaagcgcaggttaacggtgagcgcgtgttgatatgcgctgccggaaaacatcctgctgatgcatttgctggtttgattaatgaactggaaagcgccgggcaaacggtagtgctggtagttcgtaatgatgacgtgctgggtgtcattgcgttgcaggataccctgcgcgccgatgctgcaactgctatcagtgaactgaacgcgctgggtgtcaaaggggtgatcctcaccggcgataatccacgcgcagcagcggcaatcgccggggaactggggctggaatttaaagcgggcctcttgccggaagataaagttaaagcggtgaccgagctgaatcaacatgcgccgctggcgatggtcggcgacggtattaacgacgcgccagcgatgaaagccgccgccattgggatcgcaatgggcagtggcacagatgtcgcactggaaaccgccgacgcggcgttgacgcataaccacctgcgcggcctggtgcaaatgattgaactggcgcgcgccactcacgcgaatattcgccagaacatcactattgcgctggggctgaaaggcgttttcctcgtcaccacgctgttagggatgaccggcctgtggctggcagtgctggcagataccggtgcgacggtgctggtaacggcgaatgcgttacggttattgcgcaggaaataaagaggctatcagtctacggtccaacaatgccggatgcggcgtgaacaccttatccggcctacacagagcatcgaactcgtaggcatgataagacgcgacagcgtcgcatcaggcattgtgcaccgtatcgccagatgcagcttgaacgccttatccggcctacaaaccggtttcaagcagcaacattgagcgcgatcggtcccctcgcctctctggggagagggtaagggaaaggcagtatcgaagcccatcttcccccatcaaccgcctttacgaatcaaataacgataaggcagtccatccgtctctttagcaaccagttcgtgttccataaaggtacaaaacccaggaatatcacgggtcgtcgccggatcgtcagcaataatcagcaacgtttcacctggctgcatattgcgcactgttttgcgcaccatcattactggttccgggcagcgcaggccaagtgcgtcgagtgtgtggtcagggctggaaaagagatcggtcattttcttctcatcacataaaaaaacggcgctagtttacgccctgtgagtccgtaagcaaaccaggttaacgattgcgtgaaaattaaccattgcattgtcaacgtaaagcagtatcatgcggcggctcgaaaaaagggtaagcacgttattatgttaaggtaacagacgtgtcgtacgtattgggttccctcaccccaatggttaatcaaaaaggtacaatatgaacgttttctcgcaaacgcaacgctataaggcgttgttctggctatcgctatttcatctgctggtgatcacctccagcaactatctggtacagctcccggtctccatttttggttttcataccacctggggcgcgtttagctttccgtttatctttctcgctactgacctgaccgtgcgtatttttggcgcgccgctggctcgtcgcatcatctttgcggtaatgatccccgcattgctgatctcctacgtcatctcatcgctgttttatatggggtcatggcaaggattcggcgcgctcgcccacttcaacctgtttgtcgcccgtatcgccaccgccagtttcatggcctacgcgctggggcagatcctcgacgtgcacgtttttaaccgcctgcgtcagagtcgtcactggtggctggcaccgacagcgtccacactgttcggtaacgtcagcgacacgctggccttcttcttcattgccttctggcgtagcccggatgcctttatggctgaacactggatggaaatcgcgctggtcgattactgtttcaaagtgttaatcagtatcgttttcttcctgccaatgtatggcgtattactcaatatgctgttgaaaagactggcagataaatccgaaatcaacgctttgcaggcgagttaaaggttcgttatcagagttgtgataagatggatgaatgagccgttatggccgtttatcgaaaggaagaagtcaatgcgcaatctggttaaatatgtcggaattggcctgctggttatggggcttgcggcctgtgatgataaagacactaacgctatggcgcagggttcggtcgcagaaagtaacgcgaccgggaatcccgtcaacctgcttgatggcaagttaagtttctcgctgccagcggatatgaccgaccagagcggtaagctgggaacgcaggccaataacatgcatgtctggtccgacgccacagggcagaaagcagtcatcgtcatcatgggcgatgatccgaaagaagatctggcggtgctggcgaagcgtctggaagatcagcaacgtagccgcgatccgcagctgcaagtggtaaccaataaagccattgagctgaaaggtcacaaaatgcagcagttagacagcattatctccgcgaaaggccagacggcgtactcttccgttattctgggtaacgtgggtaatcaactgctaaccatgcaaattacgctgccagctgacaatcagcaaaaagcacagaccaccgcagaaaacatcattaatacgctggttattcagtaagttttaagatgatgaggcggcctcaggtatttccaccggaggccgtttttttaatcgccacgtcagtaataacgcgattgcgaccagtcccgccgccgccagataaatcaccggaacgcccgcccaactcatcaccagcccagccagtggtccggtcacgccaagcgataaatccataaatacggtgtaagttgccagcgccgccccctgattttgctgcggaaccgcttttaccgccactacgcccaatgcagggaacaccagcgaaaaccccgcccccgccagtaagacgccgattttcgccatccacggcatagttgccacgccaaccagtagcaggccgattatctcaacgctaaagcaaatcatcgccacgtttaagccgccgatacggttaatgccgttagggaataacaaacgcgtaccgacaaacgcacagctaaacagcgtcagcgcgaaagccgcaccgtcccaacctttagcgtcataaaacagcgtgataaaggtggcgataacgccaaatccggcggaagccagtgccagcgccataccgtacagccagacgcgcccaagcaccgcacgaaacggcagcggtttgcctttactggcttttaccgtcggacgcgggatcgccaacaaaatggccaccagtgccacgcccataatgattaacgctaacgcctgcaatccgccccagtgataaaacacgacacctaacggcgcacccatcgccatcgccccgtaagtgacaataccgttccacgaaatcacccgcccgatatgtagcgaaccaaccacgccaacaccccacagggtcgatcccgttccggcaaaactttgtccaatcccaaggattacgcgccccaggcacagtaataacaggctgatgacgggcagactggcggttaatcctgccgtcagatatcccagaccgctcaaaaagcagccgcataaaccgaagacgacaatcttttttggtcccagtaaatcggcgtaacgtccggcatgaggacggctcagcaaggtggcaaaatattgcaggctgataaccaaccctgcccagaatgcactaaatcccattacatcatggacatagcccggtaatacagcgagcggcaacccgatggtaaggtagctggcgaagttaaacatgacaatggagacaatgcgcaaattcaggcgcaatccgtttagcgcgggttcggctacgggttcgggcatgaggatcaccacatttttacaacagtgtttcatttttaccatgtgctgacgtgaaaatcagcagtaagaatcagaatattgctggcgtgactcccgctacacttaatacaaaaagtcacaaggaagccccaatggaaacccctcaacccgataaaacgggcatgcacattctgctcaagttggcctcgctggtagtgatcctcgcgggcattcacgcagcggcagatatcattgtgcagctattactggcgctgttttttgccatcgttctcaacccgctcgtcacctggtttattcgtcggggggtacaacgccccgttgccattacgattgtggttgtggtgatgctgatcgcactcaccgcgctggtcggcgtactggcggcatcgtttaacgaatttatctctatgctgccgaggtttaataaggagctgacgcgcaaactttttaaattgcaggagatgttgccttttcttaatttgcatatgtcgccggagcgaatactgcagcggatggactcggaaaaagtggttaccttcaccacggcgctaatgaccgggctttccggggcaatggcgagcgtgcttttgctggtgatgaccgtagtttttatgctgtttgaagtgcgccacgtcccttacaaaatgcgtttcgcgttgaataatccacagattcacatcgccggactacaccgcgcacttaaaggcgtttcgcattatctggcgttaaagacgctactcagtttatggacaggcataatcgtctggctggggctggagctgatgggggtgcagtttgcgctgatgtgggcagtactggcgtttttgctcaactacgtgcccaatatcggtgcggtaatttccgccgtaccgccaatgattcaggtgctgctgtttaatggtatttacgaatgtattctggtcggcgcattgtttttagtggtccatatggtcatcggcaatattttagaaccacggatgatgggccatcgcctggggatgtccaccatggtggtatttctttcattgttaatttggggatggctgctcggcccggtagggatgctactttcggtgccattaaccagcgtgtgtaaaatctggatggaaaccaccaaaggcggcagcaaactggcgattttactggggccaggcagaccgaaaagtcggttaccgggatgaggcgacaagtgttacgatacgcactttcattttccattaaacgttggccctgatatgtatcggatagttctggggaaagtttcgaccttaagcgcagctcctctgccaccgggtttacgcgagcaagcaccgcaaggtccacgacgtgaacgctggctggcggggcgtgcattgctttcgcacacgctttccccgctaccggagatcatctatggcgaacaaggcaaacctgcattcgcgccggaaacgccgctatggttcaacttaagccatagtggtgacgatatcgccctgctgttgagcgatgaaggcgaagtcggctgcgatatcgaagtgattcgcccgcgcgccaactggcgctggctggcgaacgccgtattcagccttggggaacatgccgagatggacgccgtgcatcctgatcagcaactggaaatgttctggcgcatctggacgcgcaaagaagccatcgttaaacagcgtggcggcagcgcctggcaaatcgtcagcgtagacagcacctataactcctcgctgtcagtcagccattgtcagctagaaaatttaagcctggcgatctgcacccctaccccctttacgctcaccgccgacagtgtgcaatggatcgattcagttaactgatccgcccacccgactgcccatctattgatccagaacaggtaatcagtatgacgaatacttaaaatcgtcatacttatttccgccatctattttaatccattggggttaccatgttctctacactccgccgcactctatttgcgctgctggcttgtgcgtcttttatcgtccatgccgctgcaccagatgaaatcaccaccgcctggccggtgaatgtcgggccactaaacccgcacctttacacgcctaaccaaatgttcgcccagagcatggtttatgaaccgctggtgaaatatcaggcagacggttcggtgatcccgtggctggcaaaaagctggactcattcagaagatggtaaaacctggaccttcaccctgcgtgatgacgtgaaattctccaacggcgaaccgtttgatgcagaggcggcggcagaaaacttccgtgcagtgctcgataaccgtcaacgtcacgcctggctggagctggcaaaccagattgttgatgtcaaagcactcagcaaaaacgagctgcaaatcaccctgaaaagcgcctactatcctttcctgcaagaactggccctgccccgtcctttccgttttatcgcaccctcgcagtttaaaaaccacgaaaccatgaacggaattaaagcgccgattggcaccgggccgtgggttttacaggaatcgaaactgaatcagtacgatgtcttcgtccgtaacgaaaactactggggcgaaaagccggcgattaaaaagatcacctttaacgtgatcccggacccgactacccgcgcggtggcgtttgaaactggcgatatcgacctgctgtacggaaacgaagggttattaccgctcgataccttcgcccgctttagccagaacccggcttaccacactcaactgtcacagccgatcgaaaccgtgatgctggcgctcaataccgccaaagcccccaccaacgagctggcagtccgtgaagctcttaattacgcggtgaacaaaaaatcgctgattgataacgcgttgtatggtacccagcaggtcgccgacaccctgtttgccccttctgtgccctacgccaacctcggcctgaaaccgcgccagtacgatccgcagaaagcgaaagcgttgctggaaaaagccggttggacgctgcctgcaggcaaagacatccgcgagaaaaatggtcagccgctgcgcattgaactgtcgttcatcggcaccgatgcgttaagcaaatcgatggcggaaatcattcaggctgatatgcgccagattggcgcagatgtctcgctgattggcgaagaagagagcagtatctatgctcgtcagcgcgacggtcgttttggcatgattttccaccgcacctggggcgcgccatacgatccacacgccttcctgagttcaatgcgcgtaccgtcgcacgctgacttccaggcacagcaaggtttagccgacaagccgctgattgataaagagatcggcgaagtgctggcgacccatgacgaaacgcaacgtcaggcgctgtatcgcgacattctgacccgtctgcatgacgaggcggtttatctgcctatcagttacatctcaatgatggtggtttcaaaaccggaactgggtaacatcccctacgcgccgatcgccaccgaaatcccgttcgaacagattaaaccggtgaaaccttaatgttgcgttatgtattacgccgctttctgctgctgatcccgatggtgctcgccgcctcggtgatcatttttttgatgctgcgcctcggcaccggcgacccggcgcttgattatttgcgtttatctaacctgccgccgacgccggagatgctggcctctactcgaactatgctggggctggatcagccgctgtacgtccagtatggcacctggttgtggaaggcgctgcatcttgactttggtatctcattcgccagccaacgcccggtgctggacgatatgctgaatttcctgcccgccacgctggaacttgcaggtgcggcgctggtattaattctgctcacctccgtaccgctcggtatctgggcggcgcgccatcgcgatcgtctgccggatttcgccgtccgtttcatcgcgtttctcggcgtgtcgatgcctaacttctggctggcgtttttactggtgatggcgttttcggtgtatctgcaatggctacccgcgatgggttacggcggctggcagcacatcattttgcctgcggtatccatcgcctttatgtcgctggcgattaacgcgcgtttgctgcgcgccagtatgctggacgtcgccggtcagcgtcacgtcacctgggcacgactgcgtggtctgagcgacaaacagaccgaacgccgccatattctgcgcaatgcctcgctgccgatgatcactgccgtggggatgcacattggcgaactgattggcgggacgatgattatcgaaaacatctttgcctggccgggcgtcgggcgctatgcggtgtcggcgatttttaaccgtgactatccggtgatccagtgctttacgctgatgatggtggtggtttttgtggtctgtaatttgattgtcgatttgctcaacgccgcgctggacccgcgtattcgtcgtcatgaaggagcgcacgcgtgaactttttcctctcctcccgctggtcggttcgcctggcgctgatcattatcgccctgctggcgctgattgcgctcaccagccagtggtggctgccgtatgaccctcaggctattgatttgccgtcgcgcctgctctcgccggatgcgcagcactggctgggcaccgatcatttagggcgcgatattttctcgcggctgatggcagcgacccgcgtgtcgctcggctcggtaatggcctgcctgctgttggtgctgatattagggctgattattggcggcagcgccgggctgattggcgggcgcgttgatcaggccaccatgcgcgtcgctgatatgtttatgaccttcccaacctcgattctgtcgttctttatggtcggcgtgctcggcaccgggttgaccaatgtgattatagccatcgccctgtcgcactgggcgtggtatgcacgcatggtgcgtagcctggtgatttcactgcgccagcgcgagtttgtgctggcatcacggctttctggcgcgggccatgtgcgggtgtttattgatcatctggcaggtgcggtgatcccctcgctgctggtgctggcgacgctggatatcggtcatatgatgctacacgtcgcggggatgtccttcctcggtctcggcgtgaccgcgccgaccgccgaatggggcgtgatgattaacgacgcgcgtcagtatatctggacccagccgctgcaaatgttctggccggggctggcgctgtttatcagcgtgatggcctttaacctggtgggtgacgcactgcgcgatcatctggaccctcatctggtgacggagcacgcacactaatgccacaacagattgaactccgtaatatcgcgctacaggccgcgcagccgctggtgcacggcgtatcgttaaccctgcaacgtgggcgtgtgctggcgttagtcggcggtagtggcagcgggaagtcgctgacctgcgccgcgacgctgggcattctgcctgctggcgttcgccagacggcgggggaaattttggccgatggaaaaccggtttctccctgcgccctgcgcggcatcaaaattgccaccatcatgcagaacccgcgcagtgcctttaatccgctgcacaccatgcacacccacgcgcgtgaaacctgcctggcgctggggaaacccgccgatgacgctacgcttaccgctgccatagaagcggtggggctggaaaacgccgcgcgcgtgctgaagctctacccgttcgagatgagcggcggcatgttgcagcgcatgatgattgcgatggcggtgctgtgcgaatcaccgtttatcatcgccgatgaaccaaccaccgatctcgacgttgtagcacaggcgcgcatcctcgatctgctggaaagcattatgcaaaaacaagcaccgggaatgctgctggttacccatgatatgggcgtggtagcgcgtctggcagacgatgtggcggtaatgtctcacggtaagattgttgaacagggcgatgtagaaacgctgtttaacgtccccaaacatgcggtaacgcgcagcctggtttccgctcatctcgccctctacggtatggagctggcatcatgactttacttaacgtctccgacctttcccatcactacgcgcacggtggatttagcggcaaacatcaacaccaggcggtgctgaataacgtttccctggccctgaaaagcggtgaaaccgtcgccctgctggggcgcagcggctgcggaaaaagtaccctcgcgcggctgctggtagggttagagtcgccctcacagggaaatattagctggcgcggcgaaccgttggcgaagctcaatcgcgcgcaacgtaaagcgttccgccgtgatattcaaatggtgtttcaggactccatcagcgccgtgaatccgcgcaaaaccgtgcgcgagatcctgcgtgaaccgatgcgccacctgctatcgctgaaaaaagccgaacaactggcgcgcgccagtgaaatgctgaaggcggtcgatctcgacgacagcgtgctcgacaaacgcccaccgcagttaagcggcggccagctccagcgcgtctgcctggctcgcgcgctggcggtcgaaccgaaactgctgattctggatgaagcggtttcgaaccttgatctcgtgttacaggcgggcgtcattcgcctgctgaaaaagctgcaacaacagtttggcaccgcctgcctgttcatcacccacgacttacgcctggtggaacgcttctgtcagcgggtgatggtgatggacaacggacaaatcgtcgaaacccaggtggtgggagataaattaaccttttcctctgacgccggacgtgtgctacaaaacgcggtattacccgcattccccgtgcgccgtcgcaccacagaaaaggtttaacgcaaatgcaacgagtcaccatcacgcttgatgacgatttactggagacgctggacagtctgagccagcgtcgtggttataacaaccgttccgaggcgatccgcgatattctgcgtagcgctctggcgcaggaagccactcaacaacacggcacacaaggtttcgcggtgctgtcgtatgtgtatgaacacgaaaaacgcgacttagccagccgtattgtctccacccagcatcatcaccacgatctctcagttgctactctgcatgtgcacattaatcacgacgactgtctggaaatcgccgtgttgaaaggtgacatgggcgacgtgcagcattttgccgatgacgtcatcgcccagcgcggcgtgcggcacgggcatttgcagtgcttgccgaaggaagattaacacctaccaacgcgccgttatttcctgacggcgcagtaaacttctgacaaatatcgactcacgtcacatttttttgatcacgatttggtccctcaaaatgtgagacgcttcgatcctctttttctcccgttcacctactatacgcttgaagttgtccatgattgtccatagacaactgtaaatgttcaggtgcgcgccatgaaatcattaagtaagtcgtcacaaataccgctctatcaacaagtggtggagtggataagagaaagtatttataccggggatctggtggaagacgatcgcattccttcggaataccagattatggatatgctggaagtgagccggggaaccgttaaaaaagcggtcgcccaactggtaaaagaaggcgtgttgatacaggtccaggggaagggaacatttgtcaaaaaagagaacgtggcatatccgttaggtgaaggattattgtcattcgcggaatcgctggaaagccagaaaatacactttaccactgaagttattacgtcacggattgaaccggctaatcgttatgtggcagagaaattaagaataacgcccggtcaggatattctttaccttgagcgtttacgttcaattggtgatgaaaaagcgatgctgatagagaaccgtatcaatattgagctatgccccggcatcgtggaaatcgattttaatcaacacaatttatttccaacaatagaaagtttgtcgaaaagaaaaattcgttactcggaaagtcgctatgccgcgcgattaattggtaatgaacgcggtcattttttagatatcagtgaagatgcacccgttttgcatctggagcaattagtctttttctcccgagagttacccgttgagtttggcaacgtctggttaaaaggaaataaatattatctgggcaccgtgctgcaacggcgggaattgagttaaatacacttttttatgaggaataaaatgcaaggcatacagtttcaggaaaattatattcaacgacttccggcagggttaagcgttgaacagatcatccgtcagttagcgcaaccgttggttgctgctgagctggtggtccctgattttgccgatcacgtactgaaacgtgaagcgacgtacccaacggggctgcctaccgaaccgccgtgcgtcgccattccgcacacggaccataaacatgtcaggcacaatgcaattgccgtcggtattttgccagagccggtagagtttgccgatatgggcggcgaccctgatcccgtgcctgtcagggtgatttttttgctcgccttaagcgaaagtaacaaacaattaaatgccctgggctggattatggagatgattcaggatacgccctttatgcaagccttgcttacaatggaaacaacaaaaatacacacagtaatcttaaacaaaatgaatgaacgaggtgaaatatgagtcaaaccattttatttgtctgcgccacgggtattgccacatccacggcggtaacagaaaaagtcatggagtattgcaaagagcacggccttaacgtcaattattcccaaaccaacgttgcctctttacccggtaataccgacggcgtagcgctggttgtttcaacgactaaagtgccttatgaactcgacgtgccggtggttaacggcttacccattattaccggtattggcgaagagaaagtactggcgcaaattgtttcgatccttaaaaagtaattaataataattaatttcaacccactccatcaggcgctaacgcgaggtgcgctctcgcctgaaaaagaggtttattatgaacgatatcgcgcataccctctataatattgtgcaatatatattgggatttggtcccacggtaatgttgccgttggtgttatttattcttgctctcttttttaaagtaaaacccgctaaagccttacgttcgtcattaacggtcggcattggttttgtcggtatttatgccattttcgatattcttaccagcaatgtcgggccagcggcccaggcgatggttgaacgcaccggaattaatttaccggtggtggatttaggctggccgccgctttccgctattacatggggttcgccaattgccccgtttgttattcccctgactattctgattaacgtggcgatgctggcgttaaataaaacccgcaccgttgacgtagatatgtggaactactggcattttgcccttgccggtacgctggtttattacagcaccggcagcctgttctttggtttgctggcagcggcgattgctgcggtggtagtacttaaactcgccgactggtctgcgccactggtacaaaaatactttggcctggaagggatctctttgccgacgctctcttcggtggtgttctttccggtcggtctgttggtcgacaaaatcatcgaccatatccccggcctcaatcgtattcatatcgacccggaaaccgtacagaaaaagtttggcatcttcggcgaaccgatgatggttggcactattctgggcattctgctcggcgtaattgccggatacgatttcaaaaaagtcttgctgcttggcatcagcattggcggtgtgatgttcatcctgccacgcatggtacgcatcctgatggaaggtttattaccgctgtctgaagccattaaaaagtatctcaatgccaaataccctgaccgtgacgatctctatatcggcctggatatcgccgttgccgtaggtaacccggcgattatctccaccgccctgctgctgacgccaatctcggtctttatcgcgtttgtcctcccaggtaatgaagtcctgccgcttggtgaccttgccaacctggcggtaatggcgtcgatgattgctttagccagccgtggcaatattttccgcaccgttctggcggcgatcccggtgattattgccgacctgtggattgcgactaaaatcgcaccgtttattaccggcatggcgaaagacgttaacttcaaatttgccgaaggctccagcggccaggtttccagtttccttgatggcggtaacccgttccgcttctggctgctggaaatcttaaacggcaatatcatcgccattggtctggtgccggttatcgccctggtactgtatggcattttccgaatgacgcggagcacggtttatgcctgataacagcgcagctatcgttatcgatattggcaccaccaattgcaaagtcacctgcttttcctgcctggacgcaacgacgttgggcgcgcataaattcgtgacggcaaagcagatctccccacagggcgatgtcgatttcgatatcgacgccctctggcaggaggtccgccaggcgatagcgcaactgaacgccgcttcgccgctgccggtcaggcggataagcattgccagttttggcgagtcaggggtgtttcttgacgaacatggcgagatcctgacgccaatgctggcatggtatgaccgtcgcggtgaagagtatctggcaacgcttagcgaggcagacagtgcggcactttatgacatttgcgggttaccactgcacagcaattactctgccttcaaaatgcgttggttgctggagcattatccgctgcgcaatcgtcgcggcctgcgctggctacatgcaccggaagtgctgctctggcggctgactggcgaacagcgaacggatatcaccttagccagccgtacactgtgcctggacgtgcgcaaaggcgaatggtcagcgaaagcggcggcgttgttacacgttccctgttcagcatttgcgccattggtgcagccaggcgaacacgccggatgggtcagtgagtcgctctgtaaaacgcttgggttctcgcaatcggtcagcgtgacgctggccggacatgaccatatggtgggtgcgcgggcgttgcagatgatgccgggcgatatccttaactcgacgggcaccacggaaggcattctgcaactggatacacaaccgacgctggatgaacaggccaaacgtgacaagctggcaaacggctgttactcgcttgccaaccagttcaccctgtttgcttctctgcccgtgggcggtttcgcgctggagtggctgcgtaacacgttccggctaaccgatgaggagatcgccgtgtcgctcaatcgtgggtatgcggattatctggcggggaactggtcgcttgatgacattcccgtttttattccgcatcttcgcggttcgggttcgccctataaaaatcgccatacccgaggattattttatgggcttggcgatacgttaaatatcgatatgttaattgccagcgtctcactgggattaaccatggaatttgccaactgcttcgcctgttttaatgtgcccggcaccagcgcgttaaaagtgataggtccggcaacccataatcccctttggctgcaattaaaggcggatattttacagcgtccggttgaagcaattgcatttaacgaggcggtttctgtcggagcattattaaccgccgcaccggatattccaccgccgcaagtcaccatagcccaacgtttgttaccgaatcgggcgagataccatcaattacagcgttatcagcacaaatggaaaagctggtatcagttgaaattacagcaagaaggcgtgatgccattacatcatcgggaggagcactatgttgagtaaaaccgtggaagtcagaaacagtactggcctgcatgcacgtccggcggcctgtctggcgaaagccgccaaaaaatatagctgtaaagtgacgctgcactatgaaggtaatgatattaatgccaccagcatgatgaatattatgcgcgccggaataaaaggcggaaaaacggtggaaatacgctgcgaaggtgatgatgaaaacgaggcaatacaaactctcactaccttatttcgcgaccgcttcggtgaagctgaataattaactgatattaaaagatgaggttttcaatatgccattagttaatggacggatactgctcgaccgcattcaggaaaaacgggtattagcgggcgcatttaataccaccaatctggagacaacgatttcaattttaaacgccattgagcgttcaggattacccaacttcattcagattgcgcccaccaatgcacaactgtcgggatacgattacatttatgaaatcgtgaaacgtcacgctgataaaatggatgttccggtcagtcttcatcttgatcacgggaaaactcaggaggatgttaaacaggcggtgcgcgcgggctttacctcggtcatgattgacggtgccgcattctcttttgaagagaatatcgctttcacccaggaagctgtcgatttctgtaaatcctatggcgtaccggttgaagcggagctgggggcgattctcggcaaagaagacgatcacgtcagcgaagccgattgcaaaacggaaccggaaaaggtgaagacctttgtcgaacgcaccggttgcgacatgctggcagtttctattggtaacgttcatggcctggacgatataccgcggatcgatatccccctgctgaagcgcattgccgaagtcagcccggtgccgctggttattcacggcggctccggtatcgccccggagatattacgcagtttcgttaattatcgcgtcgctaaagtgaatatcgccagcgatctgcgcaaagcgtttatcaccgcagtcggcaaagcgtatgtgaataatcacaacgaggcgaatctggcacgggtgatggcatcagcaaaaaacgccgtcgaggaagatgtgtatagcaaaatcctgatgatgaatgaggggcatcggttgggtaagtaaatcttcgccggatgcggcgtgacgccttatccggcctacaaaaccactaaaattcaataaattgcaccaatgcgtagaccctataagcttacgcatcgggcaactgtaattacgccattgtcccaattgtcttcctgaatctcagcagtgcgatggtgaaaaacgcgccgccaattgccatcagtgtcaggaactgcggccagacgatttcgaatccggcaccacggtagaggatggcctgcgcgaggctaacaaagtgtgtcgtcggcatggtcagcataatgtcctgcaccatctgcggcatactttcgcgcggcgtggaaccaccggaaagcatttgcagcggcagcagcaccagaatcaccagcagccccagttgcggcattgaacgcgctatcgtccccataaaaatgccgattgacgtggtggcaaacaaactgagcgccacgcccagcataaacagcgggatcgagccttcaatcggtacgcccagcacgcctttcaccatcagcaccagcgataatcccgacaccaccagcaccaccagccccatcgaccagacctttgccatcatgatctcaaacggcgttatcggcatcaccagtaagtgttccaccgtgccgtgttcacgctcgcggatcagtgccgatccggtcaacacaatcgccagcatggtaatgttgttgatgatcgccatcaccccgccaaaccacgcgggatcgaggttcgggttaaagcgcatccgggtttccagcgataccaacggttcgctgttatcacggtagcgcgcgacaaagctgttcacttcaccgttgataatattctggatataaccgttgccagtgaatgcctggctcatgcgcgtggcatcgacgttcacctgaatatccggctggcgtccggcgaggacatcacgctgaaaattaggcggaatatttatcgcgaaggtataacgtccggcgtccagtccggcatccatctcatcggcggtgatcatctccggtggcaaaaaccacgggcgatagaagctgttaacgatccggttcgacaactgcgattgatccatatcggctatggcgatcggcgcgaggttcaacgatcctggcgtaacggtcgctgacgaatacaccgacaccgtaaacgagaagacaatcagcgtcagcatcgctttatcaccgagcagactgcgcaactctttgatacccagattaaaaatattgcgtaaatggcgcatcatccctcctgttttttcagcagcaggatgcttaagcccatcaccagcggtatggctatcagcaacgggataaaaagttgccacaaatcagtcagatccagcgctttcgagaacgttccgcgggcgatagtcagaaaatgactggtgggataaacctcgccgatccaacgtcctggaccttccagcgaagctaccggatcgatcatcccggaaaactgtgtcgccgggatcaacgtgataattgccgtaccgaaaatggcggcaatctggcttttcataaaggtggagatcagcagccccattccggtggcgatgatgatatacagcagcgccgccagggtgagagtcaggaaactgcctttatgcggtacgccaaacacaaacaccgacagggcgcagagcaggaaaaagttcagcatccccagcgcgatgtatggcagctgtttgccaagtaaaaattcgctacgggtggtgggggtcacgtaaaggttgataatcgaccctagctctttttcccgcaccacgctaagggcgcttagcattgacgggatcatcatcagcagaagcgggatcaccgccggaacaatcgccggcaggctttttacgtccgggttatagcgatagcgcgtctcaatattcatcagcccgctttggctggcgggtgtggactgtcggctcgccacatcctgtagccagctctggtgcatggcctgcacgtaaccttttaccgtttcggcgcggctcggcatcgcaccgtcgatccagacaccgagttccacgggcgtaccacgcgcgatatcgcgcccgaaattgggagggatctcaattgccaccgtgatatcgcccgcacgcatccgacgatcaagctcgtcataactggtgagcggtggctgttcgataaagtaacgggaaccggagagattgagcgtccacgcctggctactgacggtttgatcgcggtcaagcaccgcaaagcgcaggttttccacatccatactgatgccgtaacccattatcagcatcaggatcaccgttcccatcagcgccagcgtcgaacgtaccggatcgcgtcgcagttccagcgcttcgcggcggctgtagctaaacagacggcgcaggctgaatccctgacgtggcgcgtgggtggtgtcgtgtaccaccggcggcgcttcagcttcgttgctctgccctgccgcttcctgcaaataagcgataaatgcctcttccagactggcggctccgcgtttctcaaccagttccggcggtgtaccgctggcgagcacttttccggcgtgcatcagtgagatacggtcacaacgttccgcttcgttcataaagtgggtggagatgaagatagtcactttgtcctggcgcgagagatccaccatcaactgccagaacatatccctcgccaccggatcgacgccagaagtcggttcatcaaggattaacatctccgggcgatgaatcaccgccaccgccagcgatagccgctggcgaatgccgagcggcaatgactccggcaatacatcttcgacgtcgttgagcttaaaacgctcgctcatttcagccactcgcgcgggaatttccgcttccgggatatgaaacagacgagcatgtaactccaggttttgccgcacggtgagttcgttatagagcgaaaacgcctgcgacatatagcccacccggcgacgagtatcgatatcttttggatcaaccggttgcccgaacagccacgcctcaccttcgctggcgggcagcaatccggtaagcattttcatggtggtggatttaccacagccgttcgaaccaagaaaaccaaaaatctccccgcgtggaatgcggaaattgacgtgatcaacggcaacgaaggaaccaaaacgcatggtcagatcgcgcgcttcgatggcaatctctgcgttttcaggttgatacggtgggatcactaccgcctgatgcgcctgccgttgtgcttgcggtaacagatttataaatgcttcttccagcgtggcgctttgcgtttgctgccgcaactcttcggcgctgccagttgccagcacttctccggcattcatcgctaccagccagtcgaagcgttccgcctcttccatataggcggtggcaaccagcacgctcatattgctctgccgctggcgaatgctgtcgatcagatcccagaactgggcgcgggagagcgggtcaacccccgttgttggctcatcaagaatcaacaattccgggtcgtggattaacgcacagcacagcccaagtttttgcttcatcccgccggagagtttccctgccggacgatcgcgaaacggtgctaatccggtgctggtcagcagctcattaattcgcacttcccgctccgctttgtcgtgaccgaacaggcgggcgaaaaaatcgacgttttcatacaccgacaaggtgtggtagagatttttgcccagcccctgcggcatccaggcgatgcgcgggcagacgtcgcggcgatgcttcgggtcgcgcatatcgccgcccagcaccatcacgccgccctgctcaatgacgcgagcaccggaaatcagcgacaacaagctcgatttaccgacaccatccggtccaatcagcccgaccatgcaacgggccggaatatcgagtgtgatattgttcagcgcaacggtttttccataatgctggctcacgcccgccagttgcgcgacaggcgggacgggaaccagttccagatgcgtcattgcggcaacctcaccaccaggtcgtcaggccacggaagttcttcattcacccgcacccacgctacgcccggcaatccggttttgacatattccagatgctgctggagtaattccggtgggatacgcgctttgacacggaacatcaatttcagccgctcatcgctggtttcgacagtttttggcgtgaactgggcgacgctggcgacaaaactgatggtcgcgggaatacgcagatctggtgcagcatcaagaatcaaacgtgcttcaccgcccagtttcagcgtgcccgcctgttcggttggcagaaagaaggtcatatagacgtcgctgagatcgaccatattcagcacccgaccgcctgctgccagcacttcgcctggctcagcaacccgatactgcacgcgtccgtcacgcggggctttcagttcgctgtcatcgatatctgcggcaatgcgccgttcagtggcttgtgccgcttcgacgcgagtttgcgcctgaatgatattggtgcgtgccgcctctatagcggctttagaagcagaaacctgagcttttgccgattccagcgcagctcgggcgctctcagcggcggcgcggtcgtcatccagctgttgcgcagaaattgccccccgttgtgccagtgagcgggaacgcgtatgacgttttgctacggagtccagttctgcctggcgttgattaaccagcgactgtgcggcacgagtttcgctttggcgttgctccagcaaagcctgcgcggcggcaacggcactttgtgcttctttgatttgcgcgatggcttccagtcgctgttcctgcaacacgcgagtatccatcttcgccagcacttcaccttctcgaacaaactggccttctttcaccagaatggtgtcgatacgcccggcaattttgctggcgatatccacttccgtcgcttcaatgcgcccattgctgacagcaaagccttccggcacacccgccgggcgcaacagccaccacgccacgacggcagccaccgccagtgccccgacaacccaccacgccagatggcgcttactcttatccataatcgacccgccataatccctgtaagcaatcgacgcgtgttacaactgccaccgaacgatgttcagcggattcttccatccgggataagaaggaaatggcaaatacgaccagcgcacagagcattgagcgccaatggggaaggcttagtgaaaacgggtagtaatgttgtcatcatcagcattcctggccgtaaatgaaacacgcatactcataagtgaaatcaattaaatactaacagttatattcatgttgtctatttgattgccatcaacttgtgatacatcgcgatgttcttccgttcgctggtgttttttccaaaaatattctgtacaggttcacagattctgttgcacaggtttccgtaacagggaaacctgatgactatcacatagcgttattatcgcctgatatgcgaataaataccgaatataaaataatttattctgaaaagatgatagatgataaaggctcgtgggtttaataaaatatttcctaaaagactcatttaaaacaacaaaataagataaagatattaattcagagtttatcttaggataaatatttatttaatagcattaactcaccgctaaaagttgatccccataacgctaaatccgattatagtgaagttactttttttaattgatggcatcttatagacatatttaactaactgaaaagacgaatcatatgtttttcgaagtgtagcagaaaatatatatggggtttaaaatgaatatatatatcggatggttgtttaaattaattcctttactgatgggtataatatgcatcgcattaggtgagtttgtattaaccggttctgggcaaagtgaatatttcgttgcagggcatgttctgatttctctttctgcgatatgtctggcattgttcactaccgcatttattattatatctcagttaactcacggcatgaataaattctacaacaggttatttcctgttattggttatgccggttctgctacaactatgatttggggatggtcactgttggcaagcaataatgtgatggcagatgaatttgtcgccggtcatgttattttcggcgttggcatgattgccgcttgtgtatcaaccgtagcggcatcttccggacattttctgttgatccccaaaaacgcctcgggcagtaagagtgacggtacgccattgcaggcctattcttcaacaatcggtgattgcttaattgccgttcccgttctgcttactctctttggtttcatttggtcagtcgtactgttacgtagtgcagatatcacaccacattatgttgcaggtcacgtactaatggggttaacggcaatttgcgcttgtcttattggccttgtcgccactattgtccatcaaacgcggaatacgttctcagtgaaagaacattggctgtggtgctattgggttattttgcttggctcacttaccattatttttggtatctacgtattaatcagttcagatgcaagcgcccgcctggcccccggcattattctcatttgcctggggatgatctgctacagtattttctccaaagtgtggttgttagcgctggtatggcgacgcacatgttcgttagccaacagaatacccatgattccggtatttacctgtctgttttgtctgttccttgctgcgttcctggctgaaattgcgcaaaccgatatggcttactttattccttcgcgagttctggtgggcttaggtgcagtttgttttacactgttttccatcgtttctatattagaagcgggttcagcgaaaaaataataaaaaaggcttcagataaggcgttgggcgccttatctggttttattcaggttaatccctctggtatcgagagcgcattttgcttcttattctgccaccaaatcctgcgcacaagcccatgcactcgaccacgcccactggaagttatagccccccagccagccggtgacgtccatcacttcgccgatgaagtacagcccaggcactttgcgcgcttccatcgtccgtgaagagagttcgttggtgtccacgccgccgagcgtcacttcggcagtgcgatagccttcagtgccgttgggttgtacgcgccagtcagtcaatgtgctaatcagtgtctgttggtcacgcacgttgagctgttttagcgagacatccgggatttgcccgagttgttgtaaccgttcaaccaaccgcttcggcagatgaaccgccagcgtgtttttcaggctttgattcggatgtgcattacgctgctcattcaggaaggtttcgaggtccacatccggtagcagattgatgctgacaaattcacccggttgccagtagctggaaatctgcaacaccgccggtccagataagccgcggtgggtgaagagtaagttctcacggaaaacggtaccgttttcagcggtaatcacggaaggcaccgccacgcccgccagcacctgtaactcttcaagcaacggtttatgcagagtgaatggcaccagacccgcacgggtcggcagcacgttgaggccgaattgttcggcaatcttataaccaaacggcgatgcgcccagccccggcattgacagtccaccggtcgcaatgaccagcttttcgcaaccgacagtcatgccgttcagttcaagcgtgaagcctgtatcatccttcgccacgctcagcacttcgctacgcaatctgaaggccacattgcccttctcgcactcatccaccagcatgtcgacaatctgctgcgcggagtcatcgcagaagagctgccctaacgttttctcgtgccaggcgatgccgtgtttattgaccagatcaatgaaatcccactgggtaaaacgcgcgagtgcagacttacaaaaatgcggattctggctcagataagcgcccggtccgacataaaggttggtaaagttgcagcgcccaccgccagacatgaggattttgcgccctggttttttaccattatcgatcagcagaacccggcgtcctgcctgacctgccagcgcagaacagaacatacctgccgcaccagcgcctataataatggcatcaaacctttccacgttgcgctcctctaagaaaaaacgggcgtgaattgtaaagattcctcagtggtcgcaccagcatcaatattactaaaaggaagtatttgcctgaattatataagataattattttttgagtgtaatccatacaggaggcaaatcaaaaaaagtctatatttcactttgcccgcgccgcgaaagtcactgataatgcgccgcgttcatgtcctcaaaatggcgtaacgtcctatgctacatttgtttgctggcctggatttgcataccgggctgttattattgcttgcactggcttttgtgctgttctacgaagccatcaatggtttccatgacacagccaacgccgtggcaaccgttatctatacccgcgcgatgcgttctcagctcgccgtggttatggcggcggtgttcaactttttgggtgttttgctgggtggtctgagtgttgcctatgccattgtgcatatgctgccgacggatctgctgcttaatatgggatcgtctcatggccttgccatggtgttctctatgttgctggcggcgattatctggaacctgggtacctggtactttggtttacctgcatccagctctcatacgctgattggcgcgatcatcgggattggtttaaccaatgcgttgatgaccgggacgtcagtggtggatgcactcaatatcccgaaagtattaagtattttcggttccctgatcgtttcccctattgtcggcctggtgtttgctggcggtctgattttcttgctgcgtcgctactggagcggcaccaagaaacgcgcccgtatccacctgaccccagcggagcgtgaaaagaaagacggcaagaaaaagccgccgttctggacgcgtattgcgctgatcctttccgctatcggcgtggcgttttcgcatggcgcgaacgatggtcagaaaggcattggtctggttatgttggtattgattggtgtcgcaccagcaggcttcgtggtgaacatgaatgccactggctacgaaatcacccgtacccgtgatgccatcaacaacgtcgaagcttactttgagcagcatcctgcgctgctgaaacaagcgaccggtgctgatcagttagtaccggctccggaagctggcgcaacgcaacccgcggagttccattgccatccgtcgaataccattaacgcgctcaaccgcctgaaaggcatgttgactaccgatgtggaaagctacgacaagctgtcgcttgatcaacgtagccagatgcgccgcattatgctgtgcgtttctgacactatcgacaaagtggtgaagatgcctggcgtgagtgctgacgatcagcgcctgttgaagaaactgaagtccgacatgcttagcaccatcgagtatgcgccggtgtggatcatcatggcggtcgcgctggcgttaggtatcggtacgatgattggctggcgtcgtgtggcaacgactatcggtgagaaaatcggtaagaaaggcatgacctacgctcaggggatgtctgcccagatgacggcggcagtgtctatcggcctggcaagttataccgggatgccggtttccactactcacgtactctcctcttctgtcgcggggacgatggtggtagatggcggcggcttacagcgtaaaaccgtaaccagtattctgatggcctgggtgtttacccttccggctgcggtactgctttccggcgggctgtactggctctccttgcagttcctgtaatcgtacgcaccaaaacgagcgggtcagtttactggcccgctttttttatgcgtcattattgctgaagtgcttaatgccaaatcatcaatgcaatcaggctgaccaccaccagaccacacaatgcgctggtcagaataaactgccgacgcacccgctcacagcggcgaataaactcatcatcgtgatgatcgcgataacgttgggcatagatataccaaacgagacgcacctgtttgttgggttggccatgtgaggtaaaaaagccccctccatcaacatattgatagagcaatggatcgcagttacgcagtaccactaacaacgcgcgtagtgatgagaaatagcgcgccatgttaacaatgcaaacgacacataaagcccaaaataatgcgacggtgcttatcatacctcctccccggcgacctgcccgcggagttccaccccggggctaccgctcccgatacgctgccaatcagttaacaccaggtcctggagaaaccgcttttgtggtgaccaacatccgagcggctctatagatagtgtaggagatcaggttgttttttttccagaaggttaaccactatcaatatattcatgtcgaaaatttgtttatctaacgagtaagcaaggcggattgacggatcatccgggtcgctataaggtaaggatggtcttaacactgaatctttacggctgggttagccccgcgcacgtagttcgcaggacgcgggtgacgtaacggcacaagaaacgctagctggccagtcatcgacaactttatggaaggagtaacactatggcttataaacacattctcatcgcggtcgacctctccccggaaagcaaagttctggtagagaaagcagtctctatggctcgcccctacaatgcgaaagtttctctgatccacgtagatgtaaactactctgacctatacaccgggcttatcgatgtgaatctgggtgatatgcagaaacgcatctctgaagagacacatcatgcgctgaccgagctttcaaccaatgcaggctacccaatcactgaaaccctgagcggcagcggcgatctgggccaggtactggtcgatgcaatcaagaaatacgatatggatctggtggtttgtggtcaccaccaggacttctggagcaaactgatgtcttccgcacgtcagctgatcaacaccgttcacgttgatatgctgattgttccgctgcgcgacgaagaagaataatcttccctccacgacgtgttcctgaacgcccgcatatgcgggcgttttgctttttggcgcgccttgttacctgatgcagcgtaaacgccttatctggcctgcggtctgcgtactcaatcaaaacccctgccaatacaacatttaacaccatcatattttctatcattagtgtgatcagctggttattttctgttgtaatagtgtattaatctattcgccgcatcaatattaagaatctctgacagatataaactttttcgcgcgttatcccttacgcgttcatacttttcaggatggtattggaaggttaataaatatgaatacaacaacacccatggggatgctgcagcaacctcgcccatttttcatgatcttttttgtcgagttatgggagcgattcggctactacggcgtgcagggcgtactggcggttttcttcgttaaacagcttgggttctcgcaagagcaggcttttgtcacttttggtgcttttgctgcgctggtctatggcctcatttccattggtggctatgttggcgaccacctgctgggaaccaaacgcaccattgttctcggagcacttgtgctggcgattggctacttcatgaccggcatgtcgctacttaagcctgacctgattttcatcgccctggggactatcgctgtcggtaacggcctgtttaaagctaacccagccagcttgctttcgaagtgctacccgccgaaagatccgcggcttgatggcgcattcaccctgttctatatgtcgatcaatatcggctcgttgatagcgttatcgctggcccctgtgatcgctgataaattcggctattcagtcacctacaacctgtgcggtgcggggttaattatcgcattactggtttacatcgcctgtcgtggaatggtgaaagacattggttctgaacccgacttccggccgatgagcttcagtaaactgttgtacgtattacttggcagcgtggtgatgatcttcgtctgcgcctggctgatgcacaacgtagaagtcgccaatctggttctgattgttctctccatcgtcgtcaccatcatcttctttcgtcaggcattcaagctggataaaaccgggcgcaataaaatgtttgtcgcctttgtcctgatgctcgaagcggtggtgttttacattctctacgcccagatgccaacgtcgctgaacttctttgccatcaacaacgtgcatcatgaaattctcggcttttccatcaacccggtcagcttccaggcgcttaacccgttctgggtggtactcgccagcccaatactggcaggcatttacacgcatctgggtaacaaaggcaaagatctctcgatgccgatgaagtttactctcggcatgtttatgtgctcactgggctttttgacggctgcagcggctggaatgtggtttgcggatgcccaggggctgacatcgccatggtttatcgtgctggtgtacttattccagagcttaggtgaactgtttattagcgcccttggcctggcgatgattgctgccctggtgccgcagcatttgatgggctttattctcgggatgtggttcctgacgcaggctgccgcgttcttgctgggcggctatgtggcaacatttaccgcagtaccagacaacattaccgatccacttgagacgttgcccgtctataccaacgtgtttggtaagattggcctggttacgctgggcgttgcagtagtgatgctattgatggtgccgtggctgaaacgcatgattgcgacgccggaaagccattaattattcttgcagaaagcggggtagcgttatcgctaccccgctttacttttacaccggcgttccggcgtaaatatcaaagcgatgccctttagtgactaccgcgtttggcgtggcgacattcgccagcggcggcgcatagtccggacgcttcaccaccacgcgtttggttgccagcaaccgcgcaggctccaacaatccatcggcatcaagatccggccccaccagcgactgaaacacgcgcatctcttttttcaccagcgcgcttttctgcttatgcgggaacattgggtcaagataaactacctgcggacgcggggtgatatcgctcagcgccgtcagactggaggcgtgaatcaactgcaaacgttcctgtaaccagccgccgatttccgcatccgcataaccacgcgccaggccatcgtcgagcagcgcggcaaccactggattacgctccagcatccgcacgcggcagccgaccgaagccagcacaaaggcatcgcgccctaatcctgcggtggcgtccaccacatccggcaaataatcgcctttaatgcccaccgctttcgccaccgcctctccgcgaccaccgccgaatttgcgtcggtgcgccatcgccccgccaacaaaatcaacaaagatgccgcccagcttcggctcatcacgcttgcgcagttccaggtgctccggcgttaacaccagcgccatcaggttgtcttcatcgtgttccagcccccagcgggccgccagaacagataaggcgccgtctccggcgcctgtttcatcaattaagcagattttcactgaatgttcagcccataatgccgtaatgctccagcatcgcatccagctgtggttcacgaccacggaagcgtttgaacagctccatcggctcttctgaaccgccacggctcagaatgttgtcgaggaacgactgcccagtttcacggttgaaaatgccctcttcctcaaaacgcgagaaggcatctgctgccagtacatcggcccacaggtagctgtagtaacctgccgcataaccaccggcaaaaatgtggctgaaagcatgcgggaaacggccccatgacggagacggtaccacggcaaccagtttcttgatttctgccagagtttcgaggattttcgccccctgatccggacggaactctgcatggaggcggaaatcgaacaggccgaactccagctggcgcagaataaacagcgccgcctggtagttcttcgccgccagcattttatccagcagctccttcggcagcggctcgccggtttcatagtgaccggagataaacgccagcgcctccggctcccagcaccagttttccataaactggctcggcagttcgaccgcatcccacggcaccccactgatcccggaaacaccagcggtttcaatgcgggtcagcatatggtgcaggccgtgaccgaactcgtggaacagggtgatcacttcgtcatgggtaaacagcgccggtttaccatttaccgggcggttgaagttgcaggtcagatacgcgaccggtttttgcagcgaaccgtcggctttacgcatctggcctacgcagtcatccatccacgccccgccgcgtttgttttcacgggcatacaggtcgaggtagaagctgccgcgcagttcgttgttctcgtcatacagttcgaagaaacgtacatccggatgccagacatcaacatcgttacgctctttagcggtgatgccgtaaatacgtttcaccacttcaaacaggccgttaaccgctttgttttccgggaagtacggacgcagttgttcatcgctgatgctgtagaggtgctgtttctgtttttcgctgtagtaagcgatatcccacggttgtaactcatcgacgccaaattcggctttggcgaaggcgcgcagttgcgccagctctttttcgccttgcgggcgcgcgcgttttgccagatcggttaagaaatccagcacctgctgcgggttttctgccattttagtggcaagtgatttgaaggcgtagttttcaaagcccagcagttgcgccagttcgtgacgcagcgcgaggatctcttccatcaccttgctgttgtcccacttaccggcgttcggaccttgatcggaagcacgagtgctataagcgcgatacatctcttcgcgcagggcctggttgtcgcagtaggtcattaccggcaggtagcttgggatatccagcgtcagcaaataaccttccagctctttcgcttcagcctgggcttttgccgcagccagcgcgctttctggcatccccgccagctccgcttcgtcggtaacgagtttggtccagcccatcgtcgcatcgaggacgttgttgctgtactggttgcccagttcagaaagacgggtagcaatttcgccgtaacgctgctgtttctctttcggcagaccgatgccagagagttcgaagtcgcgcagtgcgttatcaaccgcttttttctgcgccgtgttcagcgtggcgtaatgatcgccatcgcgcaggtcgcgatatgccttatacagcccttcatgttgccctacccaggtgctgtattctgacagcagcggcagggtttgttcgtacgcttcacgcagttccgggctatttttcaccgagttcagatggctgaccggggagaagatacgccccagcacatcgtccacttccgccaacggctggcagagattttcccaggtgtacggtgccccttgcgctactacgcgctccacattttcgcggcagtcgttcagcgccttagtcacggctggaacgacatgttccgggagaattttagaaaacggaggcaattcaaagggagtcagtaacggattcgtcattagcgcagtcctggttaaagaggttaaggaagcgctcaacaggcgctttacataatgtttgtagcatggggttaagtgtagtgaatttcaatgagaaacgttacgctttcgcggcggcggcctcttttcggtatactgtcctgataggcttttgtgcgccccgaatacgggccgatttttacttaccggaacacctttacccatgctcagttatcgccacagctttcacgctggcaaccacgccgacgtccttaaacataccgttcagagcctgatcattgagtcgctgaaagagaaagataaaccgtttctctatctcgacacccacgcaggggccgggcgttatcagttaggcagcgaacatgccgagcgtaccggcgaatatctcgaaggcatcgcccgtatctggcagcaggacgatttgcctgcggagctggaggcgtacatcaatgtggtaaaacacttcaaccgtagcgggcagttgcgttattaccccggttcgccgttgattgctcgccagctactgcgtgaacaggacagcctgcaactgaccgaactgcacccgagcgattacccgttgctgcgttctgaatttcagaaagacagccgtgcgcgcgtcgaaaaagccgacggtttccagcagcttaaggccaagctgccgccggtttcccgccgtggtttaatccttatcgacccgccgtatgaaatgaaaaccgactatcaggcggtggtcagcgggatagcagaaggttacaaacgtttcgccactggcacttacgcattgtggtatccagtggtgctgcgccagcaaattaagcgcatgatccacgacctggaagcgaccggcattcgcaaaattctgcaaattgaactggcggtgctgccagacagcgatcgccgtggcatgaccgcttctggcatgattgtgattaacccgccgtggaagctggaacagcagatgaataacgtgctgccgtggctgcacagcaaactggttccggcaggcaccgggcacgccaccgtaagctggatcgtgccagagtaattgcagccattgctggcacctattacgtctcgcgctacaatcgcggtaatcaacgataaggacaatatgtcatgactaaacactatgattacatcgccatcggcggcggcagcggcggtatcgcctccatcaaccgcgcggctatgtacggccagaaatgcgcactgattgaagccaaagagctgggcggcacctgcgtaaatgttggctgtgtgccgaaaaaagtgatgtggcacgcggcgcaaatccgtgaagcgatccatatgtacggcccggattatggttttgataccactatcaataaattcaactgggaaacgttgatcgccagccgtaccgcctatatcgaccgtattcatacttcctatgagaacgtgctcggtaaaaataacgttgatgtaatcaaaggctttgcccgcttcgttgatgccaaaaccattgaagtcaacggcgaaaccatcacggccgatcatattctgatcgccaccggtggtcgtccgagccacccggatattccgggcgtggaatacggtattgattctgatggcttcttcgcccttccggctttgccagagcgcgtagcggttgttggcgcgggttacatcgccgttgaactggcgggcgtgattaacggcctcggtgcgaagacgcatctgtttgtgcgtaaacatgcgccgctgcgcagcttcgacccgatgatctctgaaacgctggttgaagtgatgaacgccgaaggcccgcagttgcacaccaacgccatcccgaaagcggtagtgaaaaatgccgatggtagcctgacactggagctggaagatggtcgcagtgaaacggtggattgcctgatttgggcgattggtcgcgagcctgccaatgacaacatcaacctggaagccgctggcgttaaaaccaacgaaaaaggctatatcgtcgtcgataaatatcaaaacaccaacgttgaaggtatttacgcggtgggcgataacacgggtgcagtggaactgacaccggtggctgttgcagcaggtcgccgtctctctgaacgcctgtttaataacaagccggatgagcatctggattacagcaacattccgaccgtggtcttcagccatccgccgattggtactgttggtttaacggagccgcaggcgcgcgagcagtacggcgacgatcaggtgaaagtgtataaatcctctttcaccgcgatgtataccgccgtcaccactcaccgccagccgtgtcgcatgaaactggtatgcgttggaccggaagagaagattgtcggtattcacggcattggttttggtatggacgaaatgttgcagggcttcgcggtggcgctgaagatgggtgcaaccaaaaaagacttcgacaacacggttgccattcacccgacagcggcagaagagttcgtgacaatgcgttaaatgttaaagggctaagagtagtgtgctcttagcccttagctacgtttccgctatcagttcagaagctgaagcagaaagcggatcagttccagcagcgcaattaacgccccaagaacgatgattgctttatcaatcacccgttttctccatgcgatggagtgagaatgcatccgcttactcatccattgcctgtcacggcgcatgtctcattgttagatgtgggctatctcactccagccagagccaccaactcagggctgaacagtaaaaaaaccgacgcgaagtcggtttttttacgtcctgattcagacctcctttcaaatgaatgcccaacgcttaattcacacctacacctttctctacacttacatattcgttaaaccatatgtgtttttgacttgtccgctttggtttgtaactctggtggcgctggcgctacacctctctttcacatcgtaatgagatactgatatgagcaacattaccatttatcacaacccggcctgcggtacgtcacgtaatacgctggagatgatccgcaacagcggtacagaaccgaccattatctattatctggaaacaccaccgacgcgcgatgagctggtaaaactcattgccgatatggggattaccgtacgcgcgctgctacgtaaaaacgtcgagccgtatgaggaactgggccttgcagaagataaatttactcacgatcagttaatcgactttatgcttcagcacccgattctgattaatcgcccgattgtggtgacgccgctgggaactcgcctgtgccgcccttcagaagtcgtgctggaaattctgccagatgcgcaaaaaggcgcgttcaccaaggaagatggcgagaaagtggttgatgaggcgggtaatcgcctgaaataaagcggctatattcccccacaggttgttagaaaaatgcgctttatttatgtcggatgcgacgctggcgcgttttatccgacctacaaagttatgataattcgatgaattgtatgttatttgtaggcctgacagtcgtagcgtatcaggcgattttgctatttacacagtactccctgcgtgagattccaattatcgcgtccagcatggtgtatcagtgagctgcttagttatcagcgatacagtgcagcagtttaaagatgtactggattatgatttatcagtggtttacacaataaataatttcaacatacgttaacctattttattattacatatctaaaacatcacaaaaatatcacttcacacactatcagagaacatcatacctttttaaaacgagcattttcgatagttgttaacgttttcttttgcgatatgattattgcctttttttgcactcaaatattaccagatggaaataaaagagaagtcaaaggtaattatatcaggaagatatgacgcattatatttactgtatgtagaagaaaatccattcctgttctaattatccaatttaaaaatcttagcataaaacaaatgatgaataaggaatgttatgtcaattgactttaccccaggtgtaataaatacatataacggtgatatttataactgcacaacaaataccgataatgttaaaacgccagacacaccgaagtggccttgtgataaccgggaagaacaacaccccattaatgccccattctctggagaatggatacacctctgaacaatttgatttagcgcaacaacgccaacaaattaatgcgtgccatacgaacaccacatatacaaatgcagactactcaaagttgaggctcaacttgtaagtcttattaataacattgaaacgataagctcgacaccacttccgcaaaagacacaatcaatacttaatcagataaataacattagacacgaaaagattaaaaacctctgaatatagattatggaacaatggatactcatgccacgcccaaaaattaactgagctcaactaaacagaagagatataaacatcagacaggtttacgttactatcaggcatatcgcctcagaatcagatgaaaactataaagaaatatctattatggttttaatatttgttgataaggatagtaacatgaacatgacaaaaggtgcactcatcctcagcctttcatttttgcttgccgcatgtagttcaattccgcaaaatatcaaaggcaataaccaacctgatattcaaaaaagttttgttgctgttcataaccagccggggttatatgttggtcaacaagcgcgctttggcgggaaggttatcaacgttatcaatggtaaaacggatacgttgttagaaatcgctgtattaccgctggatagctatgcgaagcccgatattgaagccaactatcagggccgactgctcgccagacaaagcggcttccttgatccagtgaactatcgtaatcactttgttaccatcctcggtaccattcagggtgaacaacctggctttatcaataaagtcccgtataacttcctggaagtgaatatgcagggcatccaggtgtggcatttgagagaagtggttaataccacctataacctgtgggattacggctatggtgcattctggccggaaccgggctggggggctccttactacaccaatgcggtgagtcaggtaacacctgagctggtcaaataacaccaccgaaagatgcagatgctttctcagcatctgcatcatgcattacatcaaattaatacacagtaagctaactattattataagccctgtcctgttaattacctttggcaaactgattataaagttaatgtccgtaccaggagtcggttatgtttcttataattaccagggatacgatgtttttcaccgcgatgaaaaacattctgagtaaaggtaatgtcgttcatatacagaacgaagaagagatcgacgtaatgttgcatcagaatgccttcgtcattattgatacattaatgaataatgtatttcattctaattttctcactcaaattgaacgattaaaacctgtccatgtaattattttctccccctttaatattaaacgctgcctggggaaagtaccggtgacctttgttccgcgaactatcgccatcatcgactttgtcgcactcatcaatggcagttactgctctgtgcctgaagcggatgtgtccctctcgcgcaagcagcatcaggttctgagctgtattgcgaatcaaatgacaacggaagatattctggagaaactgaaaatatcgctaaaaacgttctactgccataaacacaatatcatgatgatcctcaatcttaagcggatcaatgagctggtacgccatcagcatattaattatctggtgtgaacgattgaacaatataaagaggcccagcaacagccagacctcccgttaattatacgttatgcagtaacgccttccggtatcaacgaagcaatttgcttacgccattgcgcttgctcctgttcaccttctgtacgttgaccataaagttgcgctatctgcgtaccatcatgggcaaacaattccaggctggttacgtggccatcgctggtcggtttacgggtaacccaggcttcagcaatgctctcttctaatagatgaagggtaaacgtcgggttgaaaatattcagccaacctttcattggcaccactttttctaccacaccggtgaaaatctgtacgcagccacggttgccaacaaacaccatgatttcattgccatcctgctgtgcagattcaagaatttgcgccaacgcactgttggatactttgcaggccaaatcgtctgccaccagattgaacgcctgttggcgcgtcaggttgtggcgcttgagcaacgtaaaaaactgatgaacgtcggtcatcgcccgccactcttgctcgaccacactggcatcggctcgcgtttgaacaactggcgcatcaacggcttttaactcaagcggcgtattctcatcggtgataaaccgtgccagaagctcactccatgccgccatatcggtattgtcggtggcataaacttttagtaatgcatcgccctgatgatcaaagaactgaatactctggcgttcgccacgagccgtgttttctttgatgtggaaaacactggcccattgattgagaaacagacgtaaatccagcgcgcgcggattgaggatcaatccggcatgtccgttcaaatgctggtttgtgaacgcaccaacttgttcatggactgcgtattcattacggcaaatacatttggtctcgccaacactttcgagcgccgccagaatttcacgaatatcgccgcgcatccgccacgcgtcgtgcgtgacgcgtgcaaatgccagttctgcttcgctgatattcattaaacctgcgatgtcacgcgcgtactttccgggattttgttcttttaactcaagccagcgtgtgtagtggttcattgtctctcttccttccagataaatgccccgaaatatcggggcagatgattaccattgataactcacgaaaatttttccgttacgaccatcctgtgggatgccttgcggcgaccagtactctttatcgaaggcgttgcccaataccagagtagtggtcatgcctttgagcgcctgctgcccttgataactgacgtagaaatcattcacaccatagccaggttgtttgctgtagctgctgctgatatgtgttgagcgatcggcaaacgtaccgacccaaccaacagagaagccgctgtgagcgatcggaatattcagggtactggtaacggtatccgggttaatgctggagatatattccccggtatcggtgtctttgccgcgggtacggttataggccacatcaaggctaaacagatcagtggtatatttcgtcatcacatcccagccccagattttggcgttcgggacgttatacgacatagttgtcgccgccgcgaaatcgacggtcgtggagatataatctttcgctttggtatcaaagtagctggctttaaattccagagcatcattggacaacatcaggtcatcaaaacgcagcccaaaaccgtactcctgagtttcgttagtttccggacgtaagttcgggtttggcacccaatagttggtatagaagcgaccaatcgagaagtgtttagaatcgttatacatttcgcccatcgtcggggcgcggaatgcctgagcatatgagccaaataacatcagccagttggtcgggttgatagtcatccccgcacgagatgaccatttgtcggcatcaacatctttgtagccgtcgctgctaccgcgataactgtcatagcgggttccgccaagcagggtaatcggcagatcgcgtaaggtgatctcatcttgtagccagccagagctaaaatcgatttttgcttgcgggaagcccgtcgtcgcgccacccggatgttgttcctgacgataatactcaccgccatatgtcagtaagtgagaagcgaaactgtcggcaaatagagtggaacggttctccagccttgctccttttgttatctgttcacgatactcgcctgaactccccgtgttttgcgcattaatacggacttccgaccagtaaatttttgcatctgcatttaaccagtcgttaccctgcggggcgagtttataagaaagctgcgcatcgcgttgaattgttgaacgatcgaccatcgggttgctgctatcagaagcttcaacggtctgcggattttttggttcacgcgcgtcgttgttgtagtaacgcactaaaccgctcagagactgggctgaatcaatttgccaggtccctttcgccagcatgttattaatggactcgtcattcggcgcggtttcaccattgctctggcgtaaatcaccccgatcgcgactggaccaggccacaataccatccagattttcagttcgcccaaacgcgctcgcgcctaatcccaggctatggtcccccgtgccgccagtaccaaagacacgaaaaccactgctttgtccttcctgcaataaatcttttgcatcgaccgtatcgtaggagatcactccacccagcgcgccactgccatacagtaatgctgaaggtccgcgaacaatctcaacacgcttgatcagcgccggatcgagaaaagtgccattcaggtgtccggtatccgttccctggcgaacaccatcgacaagaaccagcacgccgcgatgatcatagccacgcatatttacatcctgaccgttggttcgtccggtaccatcaagagtaattccaggaacatgacgcagcaaatcagtggctgaagtagcagtttgattttcaggagcggaagtgtcgataacgctgaccatcataggcgcttcgaaggaactacgtgcattccccgttgccgtaacggtcatggtttcagtagcaaaagcaaacgttggcaaggtggcagaaacagccaaagccaacaaactcaaacgcaacgaggtaaattgcggacgtgacatagcgattctccatgaggaaaataaaaaatgctggctgcctgggttaataccggggtggctggcgaaaaataaatttatttacaattcaaatgattagatatcaccacgggaagctattagcgtatatatcccgtaaaattgccgaatatttctgataattcagcaaaagcacgccctctttgtcaggcaaagtagtacgccacgtctgaagtgaagagtgctgtgcgttttcccttacaaaagatatgattttgttatccatgatgtcatattttgttaaactcaaacgtgataatgagaattattatcgatcaattttttatgatcaagctttttttaaccgccattaacacaataaacagggggttatgaaatctatccagcatccagaaaaccatcctgtgtttatggctatccccccacaacctcatcacaaaacgttgtcgttaacagtgataattttctcttctctttgctctgcaagccgcgatatctccgggttctcagctttttcccgcgctgaaatttaatcggtaacaagaacattagctgacgaagcatcttgataaaaatcaaaaataaatacgcttgtaacgccgtgcgtattgaatcgacggttgtatttcatatataactcaaatgataatcatgatcattctcaatttgataagagttctcacattatgccaaggatcatcaccaggccgtttcttttttccccactaacgttatgtatttcagccgtggtctctgccgcgaagaccatggtaaaacgaaaaaaattgtttacggcattactggctcttagctggacttttagcgtaacggctgccgaacgtatcgtggtcgcaggaggatcgctgacggagttaatctacgcgatgggcgctggcaaacgcgtggttggtgtcgatgaaacgacatcttatccaccagaaaccgccaaactgccgcatattggttactggaaacaactcagcagcgaaggcattttgtcacttcgcccggatagcgtaattacctggcaggatgcaggaccgcaaattgtgctcgaccaactgcgggcgcaaaaagtcaacgtcgtcactctgccgcgtgtaccagccacccttgagcagatgtacgccaacattcgccaactggcaaaaacgttacaggttcctgaacaaggcgaggcgctggtgacacagatcaaccaacgcctggagcgagtacagcaaaacgtggcggccaaaaaagccccggttaaagccatgtttattctctccgcaggcggaagtgcgccacaggttgccggtaaaggcagcgtcgcggacgccattctttcgcttgccggagcagaaaacgtcgctacccaccagcagtacaaaagctacagcgcggaatcgctgattgcggctaaccctgaagtgattgtcgtcacctcacaaatggtcgatggcgatattaatcggctacgttctattgccggaattacccacactgccgcatggaaaaaccagcgcattatcaccgttgatcaaaacctgattctgggaatgggtccgcgtattgctgatgtcgttgagtctttacaccagcagctttggccgcaataaatggatttaaatcagacgaatgaacacaaataacaccctggatctcacgccacattttgctttagacggtgatcagccctttaaagacaggcgcgccatgatgccgtttcgtggggccattccggttgccaaagagcaactggcacagacctggcaagagatgatcaatcaaacggtatcaccacgtaagcgactggtttacctacacattcctttttgtgcgacacactgcacgttttgtggtttttatcagaaccgttttaatgacgatgcgtgtgctcattataccgacgccctgattcgtgaaatagaaatggaagcagacagcgtattgcatcagtctgcccccatccacgcggtctatttcggtggcggtacgccttccgcgctttcagcacacgatttggccagaatcatcaccacattacgagaaaagctgccactggcccctgattgtgaaatcactattgaaggccgggtactgaattttgacgctgagcgaatcgatgcttgccttgatgctggagcaaaccgcttctcaattggtattcagtcgtttaacagcaaaatccgcaagaaaatggcccgcacctcggatggcccaaccgctattgcgtttatggaaagcctggtcaaacgcgaccgtgccgcggtggtctgtgacctgctgtttggtctgccgggtcaggatgcgcaaacctggggagaagatctggctattgcccgcgatatcggtctcgacggcgtcgatctctatgcgctcaatgtcctgcccaatacaccgctgggcaaagccgtggaaaatgggcgtactaccgtgccctctccggcagaacgtcgcgatctttacctgcaaggatgtgattttatggacgatgccggttggcgctgcatcagtaacagccactggggccgtaccacacgcgaacgcaatctctataacctgctgattaaacaaggtgccgattgtctggcctttggttccggagccggcggttcgattaatgggtactcctggatgaacgaacgcaatcttcagacctggcatgaatccgtcgcggcaggcaaaaaaccgctgatgatgatcatgcgtaacgccgaacgtaatgcgcaatggcgtcataccttgcagtcgggcattgaaacggcgcgtgtaccgctggacgaacttacgccacatgccgaaaaactcgcgccgttactggcccagtggcaccaaaaaggcttaagccgcgatgcgtcaacgtgtctgcggttgaccaatgaaggtcgtttctgggcaagcaacattttgcagtctcttaatgaactgattcaggtacttaatgcgccagcaattgcgcttgaaaaaccataacaggagtgatttatgagccatgtctcgttacaggaatttttgaaaacggagccagacggtacgctggaggcgatcgccgaacaatacaacaccacgctgctggaggtagtgaaaaatctgccctctccgactgttgtgtcaggtgataaattcgatactgtctgggataccgtctgcgaatggggcaacgtcaccacgttagtacatactaccgatgtaatactcgaatttagcggcgaactgccttcgggtttccatcgccacggctatttcaacctacgcggaaagcacggcatgtccgggcatatcaaagcagaaaactgcacgcatattgccttgatcgaacgtaaatttatgggcatggacaccgcctctattctctttttcaataaggaaggcagcgcaatgctgaaaatcttcctcggtagggatgatcatcgtcagctcctgagcgaacaagtcagcgccttccatgctctggcagcatcgttaaaggaacacgcctgatgacaccgtggctactctttggcgcaggcggaaaaggtgtgggtgccagaacgcttgaactggcgctggcggaacaacgtccggtcgttgctgtcattcgtcatgccgatgccgccacgaaactggcgcaacaaggcgtacaggtttttacaggcgacgcctgtgatgccagcgtagtcgcggctgcttgccgcgcagctggcccggatgcgcttatcatctcaacaatgggcggagctcaggattatctggcgcacagaacagtgattgacgaggccgagaaagcaggcatcacacgcatgattctggtgacgtcactgggatgcggcgatagctggccgtttttatcagagcgggcaaaggctgcgtttggtcaggcggtacgggaaaaaacgctggcggaaagctggttgcaaaccagccagcttgattatgccattctccgccctggcggtctgcttgatggtgcggcaacgggcaaagcacaacggatacaaaatcaggagtgtcatggttttattaaccgtgctgatgtcgccgcacatatccatgaactggcaaatgcgccagcacttaaccagcaggtctacagtctgattgaaccggacctgaaaccggcgtgatcccccggcgcggcatgtccgcgccgtaatgtcgtaacggagttttgcgtgctcaaggattcactctcttccgccagggtctttatggggctatcactattattgctagctctggtgctgtttggtgccagtcagggagcgttaaagatcagttttgatgccctttttgatgaggaataccgcgatatctggctcaatattcgtctaccacgggttttgctggcggtgctggtaggtgcagcgttggcaaccgccggggtaattatgcaggggctttttcgcaacccaatggctgaccctggattactcggcgtcagtagcggttctgcattaatggttggcgttgctattgtgctgcccttctccttcccagtggtgctggtgctctatgagcaaatggtgtttgccattgccggaagtttagtggtctgcaccatcatttttctcatcacgcagcgccatcgcgatggcagcatgatgcaattattactcgccggtatcgccatcaatgccctgtgcggcgcagcgatcggcatcctgagctatatcggcgatgagcagcagctacgacaactcacattgtggatgatgggcaatcttggacaggcgcaatggccgacgttattggttgccagttcattcatcctaccggccattatcgcaacaacttgtctcgccggaacgctgaatttactgcagctcggtgatgaagaagcccactacctcggcgtgaacgtgaagcgtaaacgccagcaattactgttagtgagctcactgctcgttggtgctgccgtatcggtaagcggcattatcggctttattggcctggtgatcccgcatctgattcgcatgactaccggggcaaatcaccgctggctaatcccttgttccgccctcgccggagcctgtttattgctgatggcagacacgcttgcccgcacgctggtacagccagcagaaatgcccgtgggattattaaccagcctgcttggtggcccttattttatgtggttgattctgcgcaaccggaggatcacatgatcagcgcccagaatctggtttatagccttcaggggcggcgtctgactgataatgtctcgctgacttttcccggtggggaaattgttgccatcctcgggcctaatggtgcgggaaaatctacgctgcttcgccagctaaccggctatcttcaacctgatagcggcgaatgtcggttgtttaataagccattaaatgaatggtcgattactgaactggcgaaacaccgggccgtgatgcgtcaaaatagccacatggcgtttccattcagcgtacaagaagttatccagatggggcggcatccgcatcgtactggtaatcaggataatgaaacagcacaaataatggcgttatgtgactgtcaggcgttagcaaaccgcgactatcggcaattatccggtggtgaacaacagcgcgtgcaattagcgcgcctgctggtgcaactctgggaacctactccctcaccgaaatggttatttcttgatgaaccaacttcggcgctggatattcaccatcagcagcacttgtttcgtttattacgccagttagttcacgaacggcagttcaatgtttgctgcgtattgcacgatctaaatcttgccgcgcgttatgcagaccgtgttgtattaatgcaaaaaggaaaggttatcgcaaatggtaagccgcaggacgtattgacacagcaggcgctaacaatgctctacggcgcggatattaccgtacttaaagatcctgccaaccattcaccactgatcgtcctcgatcattaaaaccaacaggagtaccgcactggtactcctgcgaataaataactatacagattagctaattgaaacgcctttcacccctgccataccttttaataatcgcaacagatcttctatcgacgtcgtggcatgaagctggatatcaatggcgaccacttcatgatcttcattttcctgcaacgaaactaaatccgtttttattttttgctgcttaaaccagtcgagcattgataccgtattaccgttcactaatgtcagctgtaaatggtaatttttgttcatcaggcggaaggttaattgatggaagacttccagcaccagcaaggtcatcactgaaccataaatacccagttcgtacataccgctgccaataaccataccaatggcggcggtcacccagatatccgctgccgtcgtcagacctacaatattttggttacgaacgagaatgttacctgcaccgataaacccgacgcccgtcacaacctgagcagcaatacggctgggatccagtccgacgtgacctaaagacagcacgtcagcaaaaccatatttcgaaacaatcataaacagggcgcttcccatgccaattaatacatgtgtgcgtaaccctgctcctttgccgcgcatttgcctttccatgccaatagcgccacaggcaattaccgcaagtataagtcgtataataaattctgctgtcatataaaaatgaaaaaaggagcagcaagatggctcaacttgctactcctttttacttgtaccttattaattcggcaagtcattagatgcttgatttttgaaggtatacaaatttttctgcgggtttttcttgcagtattcgatcactttaggaatttgagtgagatcggtttcatttaaagtaacggtatcgccacctttatatactgtttcttcatgcagcatccaccacgcaactggtgtcattgcttttggattcagatcaataaattcctggcaggtcatatctttagcggattcattggctgccagcgcagattgtgcgttcaccagtgacaaagccgctacagcgcccataaaaataaacgctttacggagagatgaaatgttcattttgtaacccattcaatatagagattatatacaaacaggaggaatagctgcttttaaagaagatattccggcctgttcaatatgcaaggaaatacgatgtaacgcattcccggaattacatatctttcttaattttgtcccattcgcctttaactttatctttaaagctggcttttttatcctgagtacaagcctgaacgatagctggggttacggttgcaataccctgaacatctaaaaccgcatcttctggtttatctttgttgttcagtgcttcagcaaaaccgactgcagttggctggaaggattcgtccacagccaggaaatcttcacaggtccaggagttgaccggttttttgttatcagctgctttttgtgcatccgctgcattgctcactactggcagaagaagcagaccaccaagaataacgcctaatacttttttcatcgtaatatcctcaactataaagtgaaagagccgtcacgaatcaatttcgacactgaggttataacctggttttctgtatatgtcatgttgatggaaaatatcaaaatcagatatttttatttcaatacaatgagttacagatgcatcagatactgtaattaggaaatttttattaaatcgactgcattcttacacgcgtttttggcatagattgatagcaggggattttcttcttaattttatagggtggttctatgttatatatagataaggcaacaattttgaagtttgatctggagatgcttaaaaaacatcgcagagcaatccagtttattgccgtgctgctgtttatcgtcgggttgctgtgtatcagttttccgttcgtctctggcgacattttaagcacagtagtgggtgcattattaatctgctcgggcattgcgcttattgtcgggctattcagcaaccgcagtcataatttctggccggtattatccggtttcctcgtcgcagtcgcctatttattgatcggctatttcttcatccgcgcaccagagctgggcatttttgccattgcggcatttattgccggtttgttctgtgtggcaggggttattcgcctgatgagttggtatcgtcagcgttcaatgaaaggcagttggctacagctcgttattggtgtgctggatatcgtcattgcctggatattccttggtgctacgccgatggtgtcggtaacgctggtttccacactggtgggaattgaactgatatttagcgccgccagtctgttcagcttcgccagtttgttcgttaaaaagcaataattatccctatttccacctggatcatagtcacattaagtgactatgatccagttaatactctcttagctatacagtgtttcagttcaattacgcactatcattgaaacaattgcctgctgttgattatttcaacctactgaatttaatctgatttttttcgttccatggcaaattagccatttcaaacattatcatggctgatattttccgtggtcaggtttaatgttttaaaagtgctgtgggaaagtgaacaaagagttccgtaagcgttgatgctatgggcggttaaataagtaatccgggttcatttttttgcaactggcgttgattacattgcataaatatccgtgtctccagacgctatataaaaacctgaagacatgaatgagttatttaatcaggtaatttcaatgcgttaaaagaaagctggcaatccaattgccagcctaagtcgaaacaaggagactcgatatttaaatcggattacattttaactttagtaatattcttcagagatcacaaactggttattgataacttattcttgggcagtaatccgcaaaagttaaccttttgtttactggttacaaactgataacaaccaggaatcttacttaggatcaatatatggagtgcgtgatggataaatctgaagtattgattagtgttaatagacgtattagttcacgaagggcaaagttcttataggcgtttactatattgaacaacgattcggacaaggatgtaaataatgaaaaggatgacatgttcgaaacgataacggctaaggagcaagttatgatttttctcatgacgaaagattcttttcttttacagggcttttggcagttgaaagataatcacgaaatgataaaaatcaattccctgtcagagatcaaaaaagtaggcaataaacccttcaaggtgatcattgacacctatcacaaccatatccttgatgaagaagcgattaaattcctggagaaattagatgccgagagaattattgttttggcaccttatcacatcagtaaactaaaagctaaagcgcctatttattttgtcagccgtaaagaaagtatcaaaaatcttcttgagattacttatggtaaacacttgccccataagaattcacaattatgtttttcacataatcagttcaaaattatgcaactgattctgaaaaacaaaaatgaaagcaatatcacgtcaacgctcaacatttcgcaacaaacattaaagattcagaaattcaacattatgtacaagctgaaattaagacgtatgagcgacatcgtcaccctgggtatcacatcttatttttagtaaggacataagcagctgaaattgatggctggcatgacgagggatgcagatgctgatttcaatacccccggtgattattgaaggagagacgaaaacgactttattcccctggtatgtgtatccaccagtagaacccttcgttgcccgaatgctggcagaaactgttggcagaacggcaacattttttttgtcgttgacctcaccatgtcgatcactgtgcttgcatcccatcttactggctgacaaccccactatgccgctggtctgtaaatccctcatatctctcctcgcgcgcaatttaaagaaccgttatttctcaagaattttcagggactaaaatgaacagaagaagaaaactgttaataccgttgttattctgcggcgcgatgctcaccgcctgcgatgacaaatcggcggaaaacgccgccgccatgacgcctgaggtcggtgtcgtcacactctcccccggttcggtcaatgtgttgagcgaattgcccggtagaaccgttccttatgaagttgccgagatacgtccccaggtgggcggtattatcattaaacgcaactttatcgaaggcgataaagtgaaccagggcgattcgctgtatcagattgatcctgcgcctttacaggcagagctgaactccgccaaaggttcgctggcgaaagcgctctctaccgccagcaatgcccgcatcacctttaaccgccaggcatcgttgctgaagaccaactatgttagccgtcaggattacgacaccgcgcgcacccagttgaatgaagcagaagccaatgtcaccgtcgccaaagcggctgttgaacaggcgacgatcaatctgcaatacgcgaatgtcacctcgccgattacgggcgtcagcgggaaatcgtcggtgaccgtcggcgcactcgttaccgctaatcaggcagattcgctggttaccgtacaacgtctggacccgatttatgtcgatctcacgcagtcggtgcaggatttcttgcgcatgaaagaagaggtcgccagtgggcaaatcaaacaggttcagggcagtacgccagtacagctcaatctggaaaatggtaaacgttacggccagaccggcacgctgaaattctccgacccgacggtggatgaaaccacgggctccgtgacgttacgggcgattttccccaacccaaatggtgacttgctgcctggcatgtatgtcacggcattagtggatgaaggtagccgccagaatgtattactggtgccgcaggaaggcgtcacccacaacgcccagggtaaagcaacggcactcattctggataaagacgatgtcgtgcagctacgcgaaatcgaagccagcaaagccatcggcgaccagtgggttgtcacctctggcttgcaggctggcgatcgggtgatcgtttccggtttgcaacgcattcgtccgggtatcaaagcacgtgcaatttcctccagccaggaaaacgccagcaccgaatcgaaacaataacgttgcaggcttaaggggactttcatggctaactattttattgatcgcccggtttttgcctgggtacttgccattattatgatgcttgcaggcggtctggcgatcatgaacttaccggttgcgcagtatccgcagattgcaccaccgaccattaccgtcagcgcaacctatccgggtgccgatgcgcaaacggtagaagactcggtcactcaggtgattgagcaaaatatgaatgggcttgatggcctgatgtacatgtcttcaaccagcgatgcggcaggtaatgcctccatcactctgaccttcgagacggggacatcgcctgatatcgcacaggttcaggtgcaaaataaactgcaactcgctatgccttcattacctgaagcggtgcagcagcagggaattagcgtcgataagtcgagcagtaatatcctgatggtagcggcatttatttctgataacggcagcctcaaccagtacgatatcgcggactatgtagcgtctaatatcaaagacccgctaagccgtaccgcgggcgttggtagcgtacagctctttggttccgagtacgccatgcgtatctggctggacccgcaaaaactcaataaatataacctggtaccttccgatgttatttcccagattaaggtgcaaaacaaccagatttccggtggtcaactgggtggcatgccacaggcggcagaccagcaactgaacgcctcgatcattgtgcagacgcgtctgcaaacgccggaagaatttggcaaaatcctgttgaaagttcagcaagatggttcgcaagtgctgctgcgtgatgtcgcccgcgtcgaacttggggcggaagattattccaccgtggcgcgctataacggcaaacctgctgccgggatcgccatcaaactggctaccggagcaaacgccctggatacctcgcgagcggtgaaagaggagctgaaccgtttatcggcttatttccctgcaagcctgaagacggtttatccttacgacaccacaccgtttatcaaaatttctattcaggaagttttcaaaacgctggttgaggctatcatcctcgtcttcctggtcatgtatctgtttttgcagaatttccgcgccacaatcatcccgacgattgccgtaccggtggttattctcgggacgtttgcgatcttgtcggcggtcggtttcaccatcaacacgttaactatgttcgggatggtgctggcgatagggttactggtggatgacgccatcgtggtggtggagaacgtcgagcgtgtcattgcggaagataagctaccgccgaaggaagcgacgcataaatcgatggggcagatccaacgtgcgctggtcgggattgccgttgttctttccgcagtgtttatgccgatggcctttatgagcggtgcgaccggggagatctaccgccagttctccatcacgctgatctcctccatgctgctttcagtatttgtagcaatgagcctgacccctgccctgtgcgccaccattctgaaagccgcgccggagggcggtcacaaacctaacgccctgttcgcacgcttcaacacgctgtttgaaaaatcaactcagcactataccgacagcacccgctcgctgttgcgttgtaccggtcgctacatggtggtctacctgctgatttgcgccgggatggcggtgctgttcctgcgtacgccgacctctttcttaccagaagaggatcagggggtatttatgaccaccgcgcagttaccttccggtgcaaccatggttaacaccacgaaagtgctacaacaggtgacggattattatctgacaaaagagaaaaataatgttcagtcggtgtttaccgttggtggctttggcttcagtggtcaggggcaaaacaacggtctggcgtttatcagcctcaagccgtggtctgaacgtgtcggcgaggaaaactcggttaccgcgattattcagcgggcaatgattgcgctaagcagtatcaataaagccgtcgtcttcccgttcaacttacccgcggtggctgaactgggtaccgcgtcaggttttgatatggaactgctggacaacggcaatctggggcacgaaaagctgacccaggcgcgaaacgagctgttatcactggcagcgcaatcaccgaatcaggtcatcggggtacgcccgaacggcctggaagatacgccgatgttcaaagtgaacgtcaacgccgcgaaagccgaggctatgggtgtggcgctgtctgatatcaaccagacaatttccaccgccttcggcagcagctacgtgaacgacttcctcaaccaggggcgggtgaaaaaagtgtatgtccaggcaggcacgccgttccgtatgttgccggataacatcaaccaatggtatgtacgcaacgcctctggcacgatggcaccgctttctgcctattcgtctaccgaatggacctatggttcaccgcgactggaacgctacaacggcatcccgtcaatggagattttaggtgaagcggctgccgggaaaagtaccggtgacgccatgaaatttatggcagacctggtcgcaaaacttccggcaggcgtcggctactcatggaccggactgtcgtatcaggaagcgttatcctcaaaccaggctcccgcgctatatgccatttcactggtcgtggtgttcctcgccctcgccgcactttatgaaagctggtcaattccgttctcggtgatgttggttgttccgttaggcgtcgttggcgcattactggccaccgatctgcgcggcttaagtaatgacgtttacttccaggttggtttgctgaccaccatcgggctttccgccaagaacgccatcctgattgtcgaatttgccgttgagatgatgcagaaagaagggaaaacgccggtagaggcaatcatcgaagcagcgcgtatgcgtttacgcccaatcctgatgacttctctggcctttattctcggcgtgctgccgctggttatcagtcatggtgccggctctggcgcgcaaaacgcggtaggtaccggcgtaatgggcgggatgtttgccgcaacagtgctggcaatttacttcgttccggtctttttcgttgtagtggaacatctctttgcccgctttaaaaaagcgtaacgtgtaaatgagagtaaggttgaacgtgagggttcagccttactctttcctgctaaccattcaccactcaacaaccagctaaccgtcaggaataccaggcttagtacacagcactgaaagtagaaaccactccagccattcgtcatcaatttgaacagcacaatactgacccacattcccgtaatcgtatgaattgttagcttaataatcccaaacatgccgagtcttttcctcctgaaaatacctataccgcctggcaaactacgaaagagaactagccggtagcccggcagaaatcatcaggaaagagtttcacatgaagcagacgtgagatcctgaccaatattcaaatgcgaaatatgtcaggaaaaggtacccggcgaatgttgcgaaaactgatgtggcgttacaccataatattgtctaaatgtatttataaagtatgacgtactgctatagccacatttttccgcaatagtatgcagaggtatttgacgtaactcgagtaatcgtctggccatcgacatcctggaggcgagtaatattttactgaaacaggtattttcatcctgcaacttttttttgatgagactctcgctggtgtacattctttctgcgatatcgcgtagataccaacgtttagcgatatcaaagctaataaggcgttcaacttttcctgaaacagtactgatactattgaaaagtaaggggatcagttctttcttatgagaaaacattgataaacaggaaagatagagcattttgctcagtatcggcgaattgacccgggggtcattgaaactatcaaaaatcgccgtcaccagctgtatggggggtgactggttaattaacaaacggtctttgctatgcaatcctaaattgcgtggcaactgacgaatattttgtaagtaatggcaaactgtcagctcttcgatatccagccgtcgcgtatcaagtgaacaaaacgcaaaatcgtctgccaaatttttatccagcagcaggatactctcgttatgcaacgatattttttgctgttcatgatgaatatcgaatgaacgacgaacgaggatcaccgagcagacatgagccatgactatcccttatatttcattactgcgattatttcaatgtcagtatactaatgaaatgacgccagactgtttctgtgtgcaaaaactgccatatttggtaggaccaaattttatccacaaagtagttttgcataacagttaattgataataagtaaatgcaacacgattatattttcacacagcgtatagcttatgtttataaaaaaatggctgatcttatttccagtaaaagttatatttaacttactgagagcacaaagtttcccgtgccaacagggagtgttataacggtttattagtctggagacggcagactatcctcttcccggtcccctatgccgggttttttttatgtctgagtaaaactctataatcttattccttccgcagaacggtcagtgccgtaaaaaatcccttgcgcagccatacttgccgccgagccacagttcggtaattcctgcgccgatcgctcctgatactctgtgggcgtcatcccataataatttcgaaaaacgtaaatgaaatacgacacgctgtgatatccacaggatactgcaactcgcttaattgaaaccccatatataacaataagttgtaaagcacgctgcatcctacactcagtaagcaactgtgaatatgacgtaccttcttcgcgcaattttttctttaacaggcttggactcatcaacaattcgctagcaattcgggctaatgtccactcatgggcgatattattattgatgaccgtacaaactcgtgttcgcatattcggttgcaacacgttcagaagtaacggtataaactgcgtatcctcaagaaaaacagataacaacgcaaagattaatgcccttttacgtagcatttctgcatagcgaagattcttattctgcgatagttgcgcaacttcctgaaaaacaggaatatctctggtacagtgatgaacgagtaatgaaggaacttttttatgtacatgaagttttaatgcctcctccttgagcatcgggagaaataatgaaagcgtgtctcttgaaactaatacgaaattctcaacacacttatccacttgaatttggcttgcatccgcaaaaaccagatcaccgccattaaaatagcgatattcaccattaaccatggtgagaatatatttatgtcttgcgtacgcaattagacaattaccatgtagtggttgcatagttgacttaatattacataaacatattactgtttattaatgtagcacgccgccctcttaagtcaaattgattgataaataaatttaaacgaagcgggaaaacaggatgataatgagcgatgatactcgggctggatgactggatttattatataaaaaggggacttaagaacgcagaggaattaatagtaagcaaataattcatcatcgtaatattaagcagtatcgctatgctccataacattcatataacatatatcttatcaacacgatgaatagacaggtaatatattattgcaattaataaatagccgaatacccacctgtttttaaaggttgggcattcggtttttacaacgtgatgttatcaggtgtgtttaaagctgttctgctgggcaataccctgcagtttcgggtggtcgctgagatatttcagggaggctttgtagtcttccagcaacagttcagcaaagtccatttcgaagccgcgacgacacataatgcgcatcaccacgatgtcggtggcttcaccgccgagagtgaaggccggaacctgccagccgcgcagacgcagacgttcagagaggtcgtacagggtgtatcctggatcttcaccatctttcagtttgaagcaaaccgccgggatgccttcgtccgggcgaccggtacagatgaactcatacggccccagtttggcgatttcatccgccagataagcggcaacctggtaggaagcgttctgtactttggtatagccttcacgaccgaggcgcaggaattcatagtactgtgcaatcacctgacccgccgggcgggagaagttgatggcgaaagtaccaatctgaccgccgaggtagtcaacgttgaacaccagttcctgcggcagcgcttcttcatcacgccagataacccagccgcagcccagcggagccagaccgaatttatggcctgaagcactgatcgatttcacacgcggcaggcggaagtcccagacgatatccggggcgacgaacggtgccaggaagccaccgctggcggcgtcgatgtgcatgtcgatgtcgataccggtgtcggcctggaatttatccagcgcatcgtgcagcggctgcgggaactcatagttaccggtgtaggtcacgccgaaagtcggcaccacgccgatggtattttcgtcgcaggcttcaatcatgcgtttcgggtccataaacaactgaccggggcgcatagggatctcacgcaactccacatcccagtagcgggcgaatttatgccagcagatttgtaccggaccgcacaccaggtttggtttatccgttggtttgcctgcggcttccatacgcttgcgccaacgccatttcatcgccatcccgccgagcatacaggcctcggaagaaccaatggtgttggtgccaacggcctgaccatttttcggtgcaggcgcatgccacagatcggcaaccatgtttacgcaacgcaggtcgattgcagcggattgcggatattcttctttgtcgatccagtttttattgatcgacaaatccatcaatttatggacgttttcgtcgtcccaggtctggcagaaagtggccaggttctgacgagcgttgccatcaagatataattcatcattgataatctgaaatgcaacatcatcgcgcatttcgtgcagcggaaatcgttttgactccgcgatagtagaaatggcctttgcgccaaaacgtgaatcgagtagttctgagcggaaatccgttaacagcttctggtccatttcgaactccttaaatttatttgaaggcaataaaaaagtaggatttatccgcaatggaagcaaggtattacaggcttaatttaaataacaaaatcctaagcagaaaaacgactttttataatataaacatttaatatgataatattaaaaacagactttattatcgtaataaaaatcgcccaaacactcctgttcgggcgatcaaattaattattgtttatcctgcatatacggcgtgtaaaccccgttcagactgtgcaggaaagcgacgatatcatccacatcctcctgcggcagctctttgcctacctgatagcgcagcatcagtttcaccgccccgtccagcgtcggcacgtcaccgcgatggaagtacggtgccgttaaagcaacgttacgtaaaccgggtactttctgacgcaatttatcacgctcttctttagtaacattcatacgaccaatatccgccgccgtaatttcaccaaagttaaagtcttttttcagccccaacggttcaaaggaacgtccgccgagaataataccaccatgacaagttgcacatttattatctttaaataattgatagccttttttctgttgcgccgtcagagcattctcatctccacgcaaccatctatcaaatggggaatccggcgtaattaatgttttctcaaattcagcaatggcatcagtaatattttcgccactgaaaccttgcggatagacttcgaggaactgcgctttaagctgcggatctttttccagcttagcaataatttcgtcccaggatttcgacgccatttcaatcgggttcaacggcggtccaccagcctgatcctgcaatgttgccgcacgaccatcccagaactgctcaacattaaatactgagttaaataccgtcggcgcgttaatcggcccaactgcgccaccaacaccaatcgatgtttttctgccatcgacgccccccgcattcaacgcatggcaatgagcgcatgaaatggtgctatccgccgataaacggggatcgtgatacagcgcaaaacccaacgccactttttgcgcatcggtaggcagtttttgcgggatgggctgcaccggttcattgcgatgctccggagcagtatcattgctggcgtaatattccgcgcgctgttttgcaatccaggccagtatttccgcccgctcttcatcactcaccttacccgcccagtgtagcgcggtataacgcgttggcggcatagtttcatactgcatcacccattcaatcttattcagatcgctttgcgaaacgggtttattagccagcagagccgcacgcacggcctcgaggttaaaagatttatatccaagctttatgtcgtaatccatcaactgtttcgcgccgggaatataataataggcaggtaattctgccgaaggcgtatggcaataatcgcatcctttttcgcggagaaagcctaaaaccttattattttcactgacagcagatgcctgaacatcggcctgtttactgcgtttattatcgtggtaccacacataaccagataaccctaaatagcaaatcgcgacgccagccaggccgatcgcggtaatacgtgagaccattttcattattcttccctcacggtagtgagttattgtgacccagaaaattttccagaatgctgcaaacgtctctgcgagacaaagccatcataaaaaacagggagatatgctttttgataggaatcaatcaattacatgaatataaactatcaataagatagccagtgcctattatccagctcaggaatggcatatcatgattgcggcgagagcaggattgaatgttctgaaaatgaaaaacaacacgaaatccgtatttttataaattccattgatattagtgcgttatattttttggcaggttaataaacgtgatccaccgcacgctttgtcgcccaccaggcggagcgaatgactacccttaaagaaaagcccgataattagcgacgaatttcggaggtcggatccttatgctcaatcagaaaattcaaaaccctaatccagacgaactgatgatcgaggtcgatctctgctatgagctggacccgtatgaattaaaactggatgagatgatcgaggcagaaccggaacccgagatgattgaagggctgcccgcctctgatgcgctgacgcctgccgatcgctatctcgaactgttcgagcatgttcagtcggcgaaaattttccccgacagtaaaacctttcccgactgcgcacccaaaatggacccgctggatattttaatccgctaccgtaaagtgcgccgtcatcgtgattttgacttgcgcaagtttgttgaaaaccacttctggctgccggaggtctactccagcgagtatgtatcggacccgcaaaattccctgaaagagcatatcgaccagctgtggccggtgctaacccgtgaaccacaggatcacattccgtggtcttctctgctggcgctgccgcagtcatatattgtcccgggcggccgttttagcgaaacctactattgggattcctatttcaccatgctggggctggcggaaagtggtcgggaagatttgctgaaatgcatggccgataacttcgcctggatgatcgaaaactacggccacatccccaacggcaaccgcacctattatttgagccgctcgcaaccaccggtttttgcgctgatggtggagttgtttgaagaagatggtgtacgcggcgcgcgccgctatctcgaccacctgaaaatggaatatgccttctggatggacggtgcagaatcgttgatccctaatcaggcctatcgccatgttgtgcggatgccggacggctcgctgctcaaccgttactgggacgatcgcgacacgccgcgtgacgaatcctggcttgaggacgttgaaaccgcgaaacattctggtcgcccgcctaacgaggtgtaccgcgatttacgtgcgggggcggcctccggttgggattactcttcccgttggctgcgtgatactggtcgtctggcgagcattcgtaccacccagttcatccccatcgatctgaatgccttcctgtttaaactggagagcgccatcgccaacatctcggcgctgaaaggcgagaaagagacagaagcactgttccgccagaaggccagtgcccgtcgcgatgcggtaaaccgttacctctgggatgatgaaaacggcatctaccgcgattacgactggcgacgcgagcaactggcgctgttttccgctgccgccattgtgccgctctatgtcggtatggcgaaccatgaacaggccgatcgtctggcaaacgccgtgcgcagccggttactgacacctggcgggattctggcaagcgagtacgaaaccggtgaacagtgggataaacccaacggctgggcaccgttacaatggatggcaattcagggatttaagatgtacggcgatgaccttctgggtgatgaaatcgcgcgcaactggctgaagacggtgaatcagttctatctggaacagcacaaactgatcgagaaataccatattgccgatggtgttcctcgcgaaggcggcggtggcgagtatccgttgcaggatgggtttggctggactaacggtgtggtacgccgtttaattggtttgtacggcgaaccataatatttttacagccagccgctaacttcctgctggctgtaaaattatcctcttcaggaggagatatttaacatcattgccgcctgggtgcgatttttgacttccagacggcgatacagtgattccagatgcgcttttaccgttccggtactgatattcagcgccctgccgatctctttatttgattcgcccgccgctaacatggttaaaatctcccgctggcgggcgcttaacgatttgagatctttaatgtccttttccggcgtcgttcgccagtctccaggcagaaacatcatccccatcgccgcactatttaccgccaacgcaaatgtctcgacggttgaatcacgaggcacaatggccagcacattaaaatgaataacttcctgtaaccaccgtttgttgcaatccgtcgccgtaattaacaccttaacctcaggaaattgcaccacggttttttgcagcaaccagtagcaaaactcaccatcctgatcgccatcgagcatcactaaggcttcagggtaactttccagcttttgccataactcgtctgcctgactggccccctgaatactcactcctggaatacgatgctgtaaactgattttcattccatgaataaatattgactgcctgtcaaacatgactatttgcataactgaatctccacctgaatacgttaaaaagacttaagtagtggaagggtattactcgcgagaaaaaataagaattcgccatttggcggtggccattctacagagataacgcgtagaaaatagttaccgatataaatagttacagctaaacgcctgaaattacatgtcgagggcactatttaaaacatttttgaggatttccttatatcggtagttagtacgcatgcaatcaaaaatgaaattccgcgaccataaacaaaaataacaaacggcaatgagataaaaataagcacaaatagccaatacatcttctattcactttaaagtgaatcgctgaaaaatacgctctgtttaagggaattcacctttctcataaagctattcctcccttttcctgctgagaaatcgccacattcatcatgacaacattgtgaaacccggcattagatgttagaaaaaacaataaacaatgcgatatgcgcgctactgtttcgttgtgaacaacaatcggtcaaagagatggataaaattcacgcaatgcagttgttcatcaaagtcgcggagctggaaagtttttcccgcgcagcggatttctttgctttgccaaagggaagtgtttcgcgccagatacaggcactggaacatcaacttggcacccagcttctccagcgcaccacgcgacgggtcaaactcacgccagaaggcatgacctattatcaacgagcaaaagatgtgttgagtaatctcagcgaactggacggtctgtttcaacaggatgccaccagtatcagcggtaaattacgcatcgacatcccgtcaggaatcgcgaaaagcctgttactaccgcgcttgtcggaatttctctatctgcatccgggaattgagctggaactgagtagccatgaccgtccggtagatattcttcatgatggttttgattgcgtgatacgcactggcgcattaccggaagatggcgttatcgcccgttctctcggcaaactggccatggtcaactgtgccagtccacactatctgacgcgctttggttatccgcaaagccccgatgatctgacttcacacgcaatagtgcgttatacaccgcacctgggtgtacatccgttaggttttgaggttgccagcgttaatggcgtccagtggtttaagtctggcggcatgttgacggtaaacagtagcgaaaactatctcgccgccggtattgccggtctggggattattcagatcccgcgcattgccgtgcgcgaagccctgcgtgccgggcggcttattgaagtgttgcctggctaccgtgccgagccgctgtccctttcactggtttatccgcagcgtcgggagctttcccggcgtgtaaacctgtttatgcagtggctggctggcgtaatgaaagagcacctggactgaccgactatactttttaagaataaccacgacagaaggacaaaagagcggatgacgcaggaaaacgagatcaaacgtcccacccaggatctggagcacgagccgattaagcagttggataatagcgagaaaggcggcaaagttagccaggcgctggaaaccgtcaccaccactgccgagaaagtccaacgccaaccggttattgcgcacctgattcgcgcgacagaacgctttaacgatcggctgggtaaccagtttggggcggctatcacctatttctcatttttgtcgatgatccccattttgatggtgtcgtttgccgcagggggctttgtgctggcctcccatccgatgttgctacaggatatcttcgacaaaattctgcaaaacattagcgatccgacgctagccgccacgttgaaaaacaccatcaacaccgccgttcagcagcgtacgactgtagggcttgtcggtctggcagtggcgctttattccggcatcaactggatgggtaacctgcgtgaagcgattcgcgcccagtcacgcgatgtctgggaacgctcgccgcaagatcaggagaagttctgggtaaaatatctgcgtgattttatttcgctgattggtttgttgattgcgctgattgtgacgctttctatcacctcggttgccggttctgcgcagcaaatgattattagcgccctgcacctgaacagcattgagtggctgaaaccgacatggcggttgattggcctggcgatttccatcttcgccaactatctgcttttcttctggatcttctggcggttgccgcgccaccgtccgcgcaaaaaagccctgatccgcggaacatttctggctgctattggttttgaagtgattaaaatcgtgatgacctacaccctgccatcgttgatgaaatcaccctctggcgcagcatttggttccgtgctggggctgatggcatttttctacttcttcgcccgtttgacgctgttttgcgcggcgtggattgccaccgccgaatataaagacgacccgcgaatgccggggaaaacgcagccttaaaataggccggatgcggcgtacgaatttattcggcctggctccccgtaggccggataagatgcgccagcatcgcatccggctataatgcacacataacctcttgaaactctttcccagagcctctttagccatctattcaggagcaaacaatttcattccaacttataaccccagcatataaatccagttggtaacttttatttaacctaaaaccagtttaatccaccatttataaaattatgtgaagcatttcatagaagaaaaatcactggcctaaacattatcccctttttgcctgatttttgaccatttccgcgatttgttacacattgaaatatcacttttgctgtgcgtaatatggctattcgttagccaaaaaataagaaaagattatgcaagcaacagccacaacactcgaccacgagcaagaatacacgccgatcaactcgcgtaataaagtccttgtcgcctctctcattggcacggccattgagttcttcgacttttacatttacgccactgcggccgttattgtgtttccgcatatcttcttcccgcagggcgatccaacggcagcaacgctacagtcgctcgccacctttgccatcgccttcgtcgcgcgccccattggctctgccgtttttggtcattttggcgatcgcgttgggcgtaaagcgacgctggtcgcctcgttgctaacgatggggatttcgaccgtggtgattggcctgctgccaggctatgccacgattggtattttcgccccgctgctgctggcgctggctcgatttggtcagggtctgggcttaggtggtgaatggggcggcgcggcgctgctggcgactgaaaacgccccaccgcgcaaacgtgcattgtacggctccttcccgcagctgggcgcaccgattggcttcttctttgccaacggcactttcttgctgctttcctggctactgaccgacgagcagtttatgagctggggctggcgtgtgccatttatcttctcggcggtgctggtcattatcggcctgtatgttcgcgtgtcgctgcatgagtcgccggtgtttgagaaagtcgctaaagcgaaaaaacaggtgaagatcccgctgggtacgctgctgaccaaacatgttcgcgtaaccgtactgggtacgttcattatgctggcaacctatacgctgttttacatcatgacggtctactctatgacctttagtaccgccgccgcgccagttgggcttggcctgccgcgtaacgaagtgttgtggatgctgatgatggcagttattggttttggcgtgatggtgcccgtcgccggattactggctgatgcctttggtcgccgtaaaagcatggtaatcatcaccacgctgatcatcctgttcgcgctattcgcctttaaccctttgctcggttctggcaacccgattctggtttttgccttcctgctgctggggttaagtctgatggggctgaccttcggtccgatgggcgcgctgttaccagagctgttcccgacagaagtgcgttacaccggagcatcgttctcttacaacgtatcgtcgattctcggggcttccgttgcgccatatatcgcagcctggttgcagactaactacgggttaggtgcggtggggctatatctggcggcgatggctggcttgacgttaatcgccctgctgctgacccatgagacgcgacatcagtcgttgtaatcagagtgaaaagcctgatgcgctacgcttatcaggccagaatttccatacaatatattgaattagcaaggatttgtaagccggaggcgttcacgccgcatccggcatgaacaaagcacactttgccaacaatctaaatctgtttaattgccggatgtcagacatccggcaattatcatcacttcttcatctgcgacaaaattgtcctgcactgattagcctccccttcggaaggtgagatcagcgccagtaacgccgccgccggtgttaccagcgttgccagtgccgccgcaacggctccgcgagcaatcaacggcccggctttcaccccagcctgcggatttttaaacgtcccacgcacatacagcggcgaacgcagtgtgataatccgaatccctttactctccggatcaatagtcaaatccagctgttccgaagcaaaacttgccgtgccggtaacgttaatcaacgcgttctcagtatcgaaagcaaaaacctgcggacgcgccacaccgttggcaatatccagattcgctgccgcgcagttcacccgcacctcatcgtcaccaaatatcgcaccgacaatgtagttgccgacattcagcccaacaatctccatcaggttgcggctcaccagcccgtcattcatcaacagtttcaggttgccgttactgttgcctaaaagcgccgccaccgagttaccgctaccgcgcagttccgcgtcaccgttcatttcccccagcgtcttctgcatcagttccacatccggcatcagttctttcagtttcagccgacgggcctgaatatctgcccgcccttgcatcggctttttatcgccttccagatgaatattcgccgcaatgctgccgcccgccatgccaaatttcagcggttgcaggcgcaggtcagcatttttgaggatgatatgagtagaaagatcgctaatcggcaggctgctgccatgctcaatgcgccgccctttgaagcgaacatcggcatccataacgtcccatttatcggtttcgaagcggtcataaggcagcactttgcccgcaggctgaacgcttttttcgcccttcttctgttcagaccgtttcgacttttctgcccctttcccggaatcaacgccaatcaacggtcccaggtccgccagccgcaattgccgcgactcgacatcaccttccagttttggtcgtggcttgccggtggtatagatcagagaaccgtggatatcgctatcgccaatgcgcccattaaaaccgcgataatcaaagaccgacgatttttcagtgtcgattttcgctaccagccgaccatccgtttcaaacggcggtgtatcgggcagcagaacgcccgtcagttcatagagatcacccagcgaatcgccagaaaatttaagccgtaaatcgacaccccccatcttcattgggtcattcacaacgccatcaaaagcaacacgggtgttaccagagcggaaatcagcctgtaccggaaacggcgttccttcgccacgcagcgccagcataccgcctatttttcccgtaccagtgagcggttcaccgttataacgtccctgcgccttcaggccaaaaacgtaatcgcccaccttttctttatccgctttacctttcgatccggtaacttcgctgaacggcagcggcttgcctaacggatcgacaaaaatttccagatccgctttgcttactttgtcatcaatggcgatccgcccttgatcgaaaagaatattatccagctgaaacgaccacgccgacggctttgcattcgcgtctttgttgtcatcgttggcgagattaaacgtccagttattgttcttttcggagaggcgaatcaggcgcgcgtcgggcttttcgagcttgatccacggcaaccagaccgttttggtcagcagcgccagcggggccagcgtcgcttctactcgcggcaaatgcaccattgtgacttcgggaatatccggtggattgccaagaatgatgtcttccgcgtgtacatggggccacggcacccagctgcgccagccagtttcttgtttttgccgctcccacaccacgcccagatcgccacggatagcgaacggacgattcaactccgcagagactttctggttgatggtcggtttgagtcgattccagtcaaaagttgcaatcaaaatgatcgccacgacaatcaacaacaagaaagcccctgaaatcgcagcggttattttgcctgccttgctcatcgttcgcttcctcatattcttcctgtgccagtcctaaagatagtccagccaggcggaaaatgaggcagcttatagcgccagaaccgccgtattcagcgtttctatcggtgccgggcgtgaaagaaaccagccttgtgcggcgaatgcgggcgagttctgaacatcacgccactcttctggtgtttctacgccctcgacaatcaccccgcgacaatagcgattcattagatgtaaaagctgagaaaagagtgtgcgtccttccggtgactgacgcagcatcacaaacagttctcgcgcgattttgatgtagtcataacgcacttcacttagtgcagagaaatttgccatcccggtaccaaaatcatccagccacagcgggccaaattcacacatcgaggcaaaggttgaatctttcggcaggcggatgtgttccaccagttcgaaacgcagccagggaagacgctcaatctggcgcaggatttttggttgctgacgcagggcgatgagcgtagggccatcaatattgaccgatgccagcaggccgtgctctacaaagaagtcggctttttgcgccagcaaatcaatctgctctttcacaacctccatccgatggctaacggtgatttcagtaaaatagcgatccggcggcaggcgttgcgaagggttcaagggatgcgtgaccaccgttaatagctccacggccattaaccgcccgcatgtttgatagatcggctgccaggtgtaagcacgctcacactgcaaccaaaaacgccgttcctgcaagctctcgatgcttgcttcagggttgcttattcgctggataacctgccttatcatcaaagatgtcctgtgtttaaaagtgatgctgcccggactcgacaaagattatcggcgcgcaaaggcagaactttaccgcctggccggggtaaatttccccactccacaatggaatctttcaggaatacgttctggctcaaaaaaataatggaacactgttttaatatggttgaccagcaaaccaccacagcgcaaactaacgctaattttttacagatcaggttcacgactatgtccaaaaagattgccgtgattggcgaatgcatgattgagctttccgagaaaggcgcggacgttaagcgcggtttcggcggcgataccctgaacacttccgtctatatcgcccgtcaggtcgatcctgcggcattaaccgttcattacgtaacggcgctgggaacggacagttttagccagcagatgctggacgcctggcgcggcgagaacgttgatacttccctgacccaacggatggaaaaccgtctgccgggcctttactacattgaaaccgacagcaccggcgaacgtacgttctactactggcgtaacgaagccgccgccaaattctggctggagagtgagcaatccgcggcgatttgcgaagagctggcgaatttcgattatctctacctgagcgggattagcctggcgatcttaagcccgaccagccgcgaaaagctgctttccctgctgcgcgaatgccgcgccaacggcggaaaagtgattttcgacaataactatcgtccgcgcctgtgggccagcaaagaagagacacagcaggtgtaccaacaaatgctggaatgcacggatatcgccttcctgacgctggacgatgaagacgcgctgtggggtcaacagccggtggaagacgtcattgcgcgcacccataacgcgggcgtgaaagaagtggtggtgaaacgcggggcggattcttgcctggtgtccattgctggcgaagggttagtggatgttccggcggtaaaactgccgaaagaaaaagtgatcgataccaccgcagctggcgactctttcagtgccggttatctggcggtacgtttgacgggcggaattgcggaagacgcagcgaaacgcgggcacctgaccgcaagtaccgttattcagtatcgcggcgcgattatcccgcgtgaagcgatgccagcgtaaaagcagcatatgcaaaaggctggatagagtgttacccccctatccagctcatccataaatacctgatggttgtgctaactcatcaccatcaggcattactgtacaggtggaatatccgtcacttcaggatgtacgtcatccgtggcgacagatgtggcggcagccgcagtcgatggggccatgatttgatcccaggccgcctgcaacgctttcatgttaaattccggctcgcctttcggctgcagcagtattaacgccatatcattcgacaactgctgacgcagatcctgatttaacatctccaccgtcaggctgttaaggaaatcctgacgcagtttctgatattgctccggcgcgatatcgacgacctgattttgcaacgaacgcatccgctgccccatcagaatatcggtatcagctcgcgcataggcggcaaacagtttctgcagctccagtttcttttgcgccactaacgcattgaactcttcttccggcagacctttatcgcgaaccttcgccagttcacgcgccaccagattaaggttgctgttcagcttgtcgtttggtgattcgatgttgatggcacactgcgcacgcagatacagcacacgacagtcaaatccaagaccgatgtctttactgttactggcgcttaacgcttgctgaacatgccagaacagcgcctcacgggccaggtccgcacgccagtagcgcagcagtgcggctgattcacgaatcggctgccacggcgtatcccacatgatagatagccggtcctgacgcaccgcgtcggtcataatactcaccgcttccgcacgcagcggagaaagcgtcggcaccggagccggtgtttcacgtttgcctttcagttcgccaaacgttttattgatttggtcgacgaccgagcgcgcatccacgtttcccaccaccagcagcgtcattgcatccggggtgtaccatttctgatagaaatctttaatcttttccgcttcaacgggttgtttcagcggatcggcaggatcgtgacctaacaaggttgatcctttcagacgataacgccaccagccctctttagtatcggcaggccaggttgccaccatgtcctgactttgcaacgcatggttgatggtttctggcgtgatagtcagtttgccagtggcatttgccagataagagagcgcctctttcagcaagtcgttacggttattgggcaaactcagattaaacagcgtggtgtcataagagacaattaccggcggcatcgggcgtttagggtcgatcccctgctgccacaatgaacgcgcctgcgctgcgtcaaggccaccgctttgcgttagcgcaatacgagggatggcgtgactgtaaccgctctgttgtgtactttcggcgagcgaaccggtattaaccagcaggcgaatttcaacacgatcgctgggacgttggggcgtagtcagcacttgccactgtaaaccgttggaaagcgtcccctgttgccatgctggatcaggctggagcgcatctgcctgcacatagccagcagtggccatcatcagcaaaccgcccgctaaaagtcgaatttttgtgccctgcatgtgaacccctgatcaactatcctggtaataaaaaactgcccgttgtcggtcagtctaaatgacgttaaaaacacttcgtgttagaccgcaagaacatgaaaatgtcacggaagaagtgaaataaacctgaactcacccaggtggtaagttcaggcacaggggtcaattatgcgcaaacacccgcactcggggaagggagtgcgggcataagtggtgagattaagaggataattcgtgcgttttgccatccggcgcacgattattcagcacatcgtccagttttttgtggtccagttctttcacccacttagcaacgacaatggtcgctacgccgttaccgaccaggttagtcagcgcacgagcttctgacataaagcggtcgataccgaggatcagcgccagacccgctacaggcaaatggcccaccgcagagagcgtcgccgccagcacgataaaaccactacccgttacccctgccgcccctttagaagaaagcagcaacacgattaacagcgtgatttggtggacgatatccatctgactgttagtggcctgggcgataaacaccgccgccattgtcaggtatatcgatgtgccatcaaggttaaacgagtagcctgtcgggatgaccagccccaccaccgatttgcggcagccgagtttctccatcttgtctagcatacgcggcagcgccgactcggaagatgaagtccccagtacaatcagcagttcttcacggatgtaacggataaatttgaagatactgaaaccagtcgctttagcgattgaacccaataccagcaccacaaacaggatacaggtgatgtagaaacagataatcagctgccccagttgcaccagtgtgccgacgccgtatttaccgatggtaaacgccattgccccgaacgcaccaataggtgccagacgcatgatcatattgatgatgccgaaaatgacctgcgagaaactttcgatcacgttaaaaatcagttggcctttgctgcccagacggtggagcgcaaaaccaaacagtacggcaaacagcagtacctgcagaatgttaccgctggcaaatgcgccaatgacgctcgccgggatgacatccataatgaaggcgacaatgccctggtctttcgcctgatcggcgtaaaccgctaccgctttcgcatcaagcgttgccggatcgacgttcattccggcaccaggctgcacgacgttaacgatgataagaccaataatcagcgcgatggtactgacaatttcaaagtaaagcagtgcgactgcgccggtacgaccgaccgccttcatgctttccatgcccgcaatgcccgttacgacggtacaaaagatgacaggagcgatgatcatcttaatgagcttaacgaagccgtcgccaagcggtttcatttgctcgcctatttcaggatagaaatggccaaggagaataccaatggctatcgctgtcaggacctgaaagtaaaggcttttaaacagagaggttttcatagggtgtcctttagtaaaaccacaggtcttgtaaggttatggggtacctgcggccttaaaataacacccagacaacatcacagaaatgtacctggatcataattgaaacaaaaaggttaaaaagtttgagctggctcgcacaaaccagcactttttaaagttttgtaatcagtttggggtagctacttttcttccaggtaactctcttcgaagatttcaatagggagtgggcgagcaaaaaggaagccctgggcaataccaacgcccgcttttgccagccagtcgcgttgtgcttcagtctccacgccttcggcaatcatttgtaagttcaggctctgcgccagcatgataattgcagcaatcatgctgctatcttccggcaaaccttcaacaaacattttgtcgattttcagtacgtcgattggcaacgatttcatatgctgcagctgacgcagccctgcgtagcccatgccgaaatcatccagcgccacccgaactccggcattgcgcagcggacggaggattgccaccgcagcatgaggatcgtcaatacgtcggctttctgtcacttccagaatcagtgttcccggctgaatgcgatagcgggttaacagttccagcatatccgccaccatatttggatgcatcagttgcagcgctgagaggtttaccgacaagggcagcataatgccgcgctcttgccaggcagcaagcaatcgacaggactcttccagcacccagtgaccgacggtaaccatcagcccacagcactcaatgcgatcgattaagccatcgggcaggtcccaactgccatccggttgctggatacgcagtaacacttccgcactgaccagtttaccgctggtcatctcgacctgtggctgtaaccaaatcgcaaactgatgattttccagtgcattaaggatatcgctctcttccgtcaaccgcttctgggcggcttccatctgctgcagatcaaagaactgaatctgatttttgcctttatggcgagcggtaaatgccgcagaaatagcgcgactgtaaagctgttcggcggtgagatcgccgtagaacatcgccacgccaatgctacagtgcggacggagttgaatacgttcaatcggcaggcgctcgctaatgatagtgagcacttgctgacctaatgtgatagcgtgccacggttcctgtacaccgttggcaatgacagcaaagtcataaccgctaatctgcgcgaggatcatgcgtggcgacagtaccgatttgagtttttccaccagcgtcagcagcagaatttctcgttgcgcctctttcagcacacccgcagtatcacgcagggtttcacaggtgatgatcatcagcgcggtagtttgtttacgcgccaccacctgctccagcatctccatcagcaaggctttgttcggcaaatccgacaccgggaagcgcatcgcattttcgttctgttcttcataatggcgctgcagcaattgctggttgaggttgtaactgcgcaccaacataccgatttcatcgtcctgatgcagacgcggtaatgccagttggtgaccaacaagctcctggggtgggatggcgttaagttcgcgagcaatattgcgtaacggatgcaaaatcaggcggttaatgcaccagctaatcgccaccgtcaatattaacgacaaaagtaagtaaatggtcactaacgttgagagggtgctcatcacgaacttatacatgcggaaggaatccgcctgtaacaccagataggcaattggctgcgggtttgccggacgttccagcgagtaaacgcccagcgagatttgcaccggtagctcaaacaggcgagtaaccattaccggcaccggacgctctggaataaaacttttacgcagcgcctggaactggttgggcagcactacatcggcacggctgaccacgccggccggtttaatgctggcaagaatagcttccgcttcgggaatatcgcctttcaaaatggcagaagataagggttcgcggacagagcgagcaatgctttccagttgcgtagccgtgttatagcgattctgctggaccagatggaacagcaaaacggtgcaaaaaataaaaacgaacaccaggacaacggctgccaccattgccatctgcttgattgttaacgagcgacttacgcgcaaattgtctccccccggaaatcccagattgccgcccgagtatacccgatcgcagcggcattaagagaggcgctatctgaaaacttaccagtcggcgtaaggtatcagcggctgcggcggtaaatccatgtcaccctgccatccggcggcggaataacgtacgtagagcaggaaatggctgggtgcgtaatcttttgcctgctggatatcaattgccgtgccgacaaaccagttggaagtaacacgtcgttcaagtaatgcccgcgccgtgtagccaaagccctgactgctgccgccatcgttggattgccgcgcagcttcttcctgccagtcggtcgggatcagattcatcagcggataacgcggcatggttttggtgcgtgaatgcgaccacgagccagacgcccccagctcccacgaccagttttccgtgcgctcccgccacatcaccggtatggcaaacgacaggtattcctgcggactgtagtaaccgccctgaccgagtgagtagccactcaggtctttgtcataatgccagatcatgttgttcaggccgattgtgacgcggcgattgttctggttgatgaccttatagtaatagcccgtcatccagcgcacacgccagttatcttcgacatttttaccggttaactgatcaccgctaagcgatgcccagacgccgtttgcttcacctttatcgtaactcagacttagccccacgccgtcggcacgcacgccgccccattttttcccggtattgctcggagagtctttttgcccaccaaaggccagcaaagaactggagatgggccgacggtgggcgttaacggtgtaacccagcggcccgatatcatcgctgtaactgatgccgccgaccacatccaccacgttgaagcccatcggcgtggtaccgatatcccagctccagacgtcatttcgccagccgaccgccacgctggcaccggaatccgactggctgcggttgccgctacagtcctgtaatgtacaggtgccccagttgtcatcccatttgccatcggcattagtggagaaactgccgacgttcatattgacgaaatcactgcgaaagaacatccgcccgtcagaatagggcgcgtccacctgcaacatagtggtgtgcgctttcagatcggagtaaccaccggtaccgctcgaaccccagtaatcgtgctcgagagtgacgttaagatcctgctggcgatagaggtccgccgtatcgctgcgcacgccgcgtttcagccagtcatctttctcgtcgttacgggtcagccgggtaaaggtgtcgttatcctgcggacgcgtcgtggtcacaccggatgcaaccatagcgtctttgtaggtttccagcgcctgcgttggatcgcccgccagcgcttcaaacttcgcaccatcacgcagtaccatcgcgctttccatcgacggtggctgagattttgcctgcgggatcaacttattaaatgtctgctgcgccgctgcggtatcgccaagctgcgcctgtgccagcgccacgcgccgctgtgtgttcagcgaggcgttatcaatggcaggcagtttcgccagctggctacgtgccgccgctttgtcaccggcagcaatatccacttccgtcagaccaagaatggcatcggcgttagttggctcccgcgtcaggacattctgatatgcagcgcgggcggcggtgtaatcacgtcgctgctgcgcccagtcagccagcgtgaggtcaatacgcgaggaaggcggttgctggcgcagcatcgcttccgcttctgcctctttaccgttttctcgcaggcgattagcggtttccagcacctgatcgttttgcagtcgattaaccagctcctgaatattgctgttccactgcccgcgcggcaggctgttgatatgcgccaacgccgctctgtcctggtcgtgaccggagaggtacagcccgtaagcgtaaacctgctccgggtcgttcggcttctgctgcgccagattgcgcattaacgtatcggcctggctgcgttgtccggcctgccagagatcctgcgaaagtcggtaagtaatccatacactgccggggtccagcgccagtcgttgccgctgaagtgctgccgcctgcgcccatttcccctggttttccagtgcctctgcctgctgtgccagacggtcgttttgcaggctgcgttcgatatcatcaatgctgcgccgctggctggcagagagcgaggcgatatacgcttcggctttttctggcgactgctggcggtaaatattcgccagcccgcgcacggcgttagtgttgccgctgtccatacgcaaggtctgctggtaatagcgttcggcggcgggataatctttgcgcgccatcgccacatcgcccagcccaagcactgcatagctgtcggtgttatcgacattacgtgcctgctggaacagccgttctgccgggtcaggattattggctttcagcgcggcatcgccctgctggatcgccagccagtagcggtttactttcagcagactgttccatttgtcgttattgctgttgtgcggatccagcgcgagggctttttccagattcgccaccgcattagcgcgatcgcctttctgagaatacgcctggcccagcgcccccagagcctcactgtctttcgggttcgcccgcaccgcctgttgtagttcgggaatggctttacccgccatgccagagtccaccgccgctaaaccttgcgcacgagcgcggaaagcagggtcggccagctgtttttgctgttctgccagttgcgattgtgcagcagctacgctatcgccatcgctaaagatcgagagatattttttcagtgcctgaacgctggcatcgctgacaggcatgtctttaatctgcccgtaccagattttagaggccccttcgcgcccggcgttcgatttcgccatctgttccaggacggcaaaaccttcatcacggcgatcgctactaaacagtaatagcgccagattgttttgcaggcccgtgttgcccggcgtatccgcattaatgcgttttagctgattaatcgcttcgccacggcgggccggaattttcgccaccgtactccagtactcgacagcaatgtcaccttccggcggcgcaccgttgaacagtttgttgtaactcgccacagcttcttccgcatgaccagtcgtcgcctgcaatcttgcctgttgcagtgcctgacgaccatccgacgtggaaagcagcatcgtagtccgtgacgatttatacgcatttgaactcggcgctaactgcgacagccgatcgagctgtttttgtgcgccatcaatatcgccctgacgtaacagagaacgaaaacgggcagcaatcacatccgggttattcggatcaataagttccagccgatacaacgactgttgcaccaggtcttcacgatgggtcgcttcgcctaaccgaacttgctccagcaactgttgctgagcggttggtgctgcctcgaccatcggcatgacggccagaccgagggaaagcgtgaatatgtttagtgtgaatttgcgcattcctggccccagtcaggtaataactcaccttttgtcgagaagcggaaacggtgttgatcccagccttgtccaaacagggtcagcacatagttgtaataggcatcgctgccgggaaagttatcggccacgcgctggcgctgaacggcctgcgcatcgcggttttgtaaaaagggcagcatggcggcagaaaaaccgaccggtcctttaccctgcgctttccccgtagccacatccactttttccggcggataaccgtttttctcagtgaatgtcgccatcggtttaaaccggttgagcatccgcgctttttgcggatcgctgtcaggcatcatgcctacccacatgtaaacgcggatagcgtcgtagctgctgatcaatgttttttcggcttttagctgccagcctttgtctttctcatagcgcacccagtctggcgaaaagcctttcggggcggtttccagcaataaacgttgattggtttcgcgcagcgtggtccacggcgcgccaaagcgggtgaaatactgcgccagcgtcggcggcaggtagctggggttaaaacgccagctgttatcctcagcaaaacccactttgcccggtaacaacatggagcccagcccaggcaccgtcaccacttcctcccgcgcgatacgttttagcaatgcgctgccgatgtcggtataacgctgctctttccacaaacgccccgcctccagcaacgaccaggccatccagacatcaccatcggaggccgaattgctgtccagcacttcccacttactgttctctttcttgccccacagccaggcgggcaaatgttcttttaaagaaccctgagcgagattgttctgcgtccagtcgagaagattatcgaaagctgcacggtcgttagccgccagggcaaagaacatgccgtaactttgcccttcggaggtggtgattttacgcgcgtcgctggggtcgatgacgcgcccttcctgactgatgtaatcctttttaaactgctcccaggcaggccaggtacaggctgcctgaacactaaaggcagccagcagcagcatcgtcacgagtccactacgcaacacattcatcttcaattactcgttatccgggttaagacgacgacgactaataatacgcagcagacgccacagtacccacgccagcaatatcacactgatagccgccagcaccgccagcagaatcggatggtttgccagcgcataccacaagcgctcgaaccacggcagatgacctacgtaataaacatcgccaacacgtaggctgttgataccggactcgcggatcaccgcgaccgaaccgaacatggtggcgcgtttgccgctatcgttcaccgcatcgttaagcatttcataaccgcgtgggctatctgccagcagcgcaatcacgctgcgctggtcgttatacggcgactggaagccaatcaccgccgccatcgcaccggaagaggtcagcgttgactgggtttctgccgcgcgatcgctctcgtccggcacaataccggggaacggggtctggcgcatcggcgtttttacccagctttcggtagcctgcaccaacaggtcgatctgcttgtcatctttcagtttgtccgggataccaccgacgatcatgatgtcggcatctttgccctgaatggtgctgccatcatcggtcaccgtcaggttaatcgccgggaagcccgtctgcgcaccgataaagccaacggtattcagcaaggtttccatctgtgcttcgtttggcgttttcggcatcacggtgatggtttgcgacaaatccgccatccggctgaacgggaagcccgcgttagcaaaggcgcgtagatccggcatcgggatgaagtggtaatacttcgagaagtcgatggtggagtcgtcaccaatcaccacatgattctgcaccggctggaaggtaatgcagttatccaccgaaccgcccggcatcgggttcatatactcaaagtcgaaccgcagctggttggtcgcgcccagtttcagcgctggaatagagacatccgttttgccatccagcaaaccttgtaataccggaatccgcagcagcaggcggttcgcctcctgtttgctgctcaggttgaaggattgcaggaactggttattcaggctgatatccatccgcgaactgtctttcaccggcggcatggtgtagcggtaattaatatccatatcaatgccggtactgcgcatcaggtagagatccggcggcaggtttagcgaaacgttaatcgctgctggctcaagaccgctggattgtaattgttcttcataggttttcagttcaccaaaggtgaccggacgatcggtacgcacccagttcggcgcatcgtacggtttacgcggtagcagcggtttcacttcattcactaccacactttcaccacggaacagaatgttaccctgagcgatacctttcgctgcctgcaacaagtctttgtcgtcacgaccaaacaccaccagcagtttgacgtaaggattctgcggatggttaatcatctcaatcaccggggcttttaccgccggatgatcgcgcaggaagtccgggcgtttgtcattggtggcaaagacaatggcattgcgatccggcagttggttatagagcaccgggaagttctgcccacgccagccagaacgcgaaccaaaccacgaggcgacaatggcagatgcttgttgcagctcaacatccggcgcacccgcaaagaccatcggcaaggtgttggtgcggttatcacgcgggtcaaagaatggcaccgggaagtgtgacaggtcattcttcacattcagggtctgataggtcagatccagtccactgctccgcccaacatccagccaaagcgtggtgctggccgggttttcgcacacgtcctgataatggccgacaaactccagccgcacacggttgaaatcagtaataaacagcgggttaatgggcatttgtgccagcgtttttttacccaactgttctttggtcactggcagcacgcccatcagttcatcattgagataaacctttaactgcgactggacaggcagtaatgatggcgatggcgtgtattcgaggttgagcatcgccttcgtcaccacttcatcgctgcgcataccaaactcaatgctgccgttcgggttaatgccacgtagcaccatgctgcccggcggcggcgcaatttgcgcaaaggtcagcttcacatcacgggaaggaccgttctgcgccacgactggcgcatctgcgccctgcacgcccggcatcacttgccccacctgcggattttgctccgcctgggcggctacagctggctcagcattgatcagtggttgcgttgctggcgtcgcctgcgtcatgaaagaggggaacgcactcatccccagagccactgcacaaatccagaatatttttcttttcatcgcgttatcatcattgttgagccaaagcctgatccgatggttgtgccgtttcgctccgctccgggcggcgcggaataaacgatacaacccaggaaaccagagaagtcagcacacggaatatgcccttcaccgaagaaggcgcaaattccgccagatggcggtagccacggaagccgagcttcagaatatccagcagactttccagcggcttatcttccgggtagctgtcctgccagagcgcccatgtatccgcacgggcaaacgtacactgcacaaaatcgatatgttgctgggtagtgagcggcattaatttcagcccaacttcattacccatcacgcgcgccacctgagccgggaagacgtattcctgctgaccgcgtttaagcaacagattcactttctgcccttccagaatctgcgcctgaccgttgatcttgatccccaaaccaccgtcggagaaatcctgaacggtacacgagaagaggtgaccatcttcgcgggcaattgctgcgggcatcgtcatctccacgcggtgcgatcggcgtacctgtttgctttctaccgatactgcgactgcgccgccgagaataatcaggttgtagaatacccacaccatactgacgaccacggtgagcatctcggttggcggaccatagaagtagcgccagatcccaaccgctacgcccaccaggttgagcagaacaaggaagatgtagggccgcgagatcacccagtcgacgtactcttcttccaccagtccacctttggcggtgacgttaaatttgcctttgtgcgggttaatcagcgccaccagcgtcggtggtgcgatataccacgccagcaccgtttcgtagatttcactccagaaagagtggcgatatttgccctggatcttcgagttagtcaggctggcatggatcatatgcggtagcacaaacagggcgatcatcaacgctggcgcgtagatgatgtaggcatgaaacagcaggaacgccagcggcgcagtcaggaagatcagccgtggaatgcccgacaagaagtggaacatggcgttgacatagcacagtcgctgagcaaacttcagccctttaccggtgagcgggttatcgagacggaagatttgcaccatcccgcgcgcccagcgaatacgctgaccgatatgcgccgagagactttcggtcgccagccccgctgcctgcggaatacgcatatacgcggaggtgtagccacgacggtgcagacgcagagaagtgtgcgcatcttcggttaccgtttcgacagcaataccgccaatctcatccagcggcttacggcgaatcaccgcacatgagccgcagaagaaagtggcatcccacatatcattgccgtcctgcaccagaccatagaacagcgtgccttcgttcggtgttttacggaaacgccccaggttgcgttcaaacggatccggcgagaagaagtggtgcggcgtctgcatcatcgccagctgtttctctttcaggaaccagcccatggtcatttgcaggaacgatcgcgttggtacgtggtcgcagtcgaatatcgacacgaactcgcctttggcatatttcagcgcattgttgatgttgcccgctttcgcatgttcatgagtggtacgggcgatatatttcacccccacgttttgcgcaaactggcgaaactcttccctgccgccgtcatcgaggatccagatgttcagcttgtctttcggccagtcgatacccagcgaagcgtaaatggtatttttcaccacgttgagatcttcgttgtaagtcgggacaaagatatccaccgacggccacagcgacatatctttcggcaatggcaccggctgacgattcagaggccatacgacctggaaatagccgagcaccagcacaatccacgcgtacgtttcagcgaagagtagaataagcccgcacaccaggctgaccggatcgtcccagtttaacgtcgaggtgtaacgccaccagatataacggcaagaaacggtcagcgacagcacaatcagcatcagcgccgagaagcgccccggcatccgccgtacgatcagcgctaccccccacagcagcatcaggaagataaactgcgctagcgggttaaacggctgagtaacgcagattaacgccagaatcagcgagaaggtgacgatgataccaaggatcaaccgccgcgccccggcactcaaatgaccgagctcttttttctcatcaagatgctgtgttttatggctaacgcgctcaggcagctcgttcatccattgatggtaacgtccacgaatattttgtagacctgaaaatgcccgcctgcgcggtttcggcgtttctttgcgcgatgcaccgatcagtaaccagcatgtttgaataagataacggaccgggtccagcggacgcggacgcgaggcgttgatatgcggatacaggtttttatgttctgcgcgaatacgctgccagcgcgggtgctccagcggaataaaaatccaggccaggatcatccagaaacagccgagcgtcgcgctgaaagccgacgcgccgtgacgacgataatcgcgataacgcccgataagccgtgcgttgaccggcgggataagcaaccaccgggtcaggatactcatgatgcactcccgactggcgttttcagcccggaatagtttaacaggcaccagttagccagcgtcagtatttcttcagccgccagcgcatcactgcgaaattcaccgactggttgcttagctgccagacattcagccatcgcttcatcacgatgaatgagcatcggcagcaatcggcgctggctttgcaaccaaagctggtaaatatcgtcctgaacctggctgccaatacggaagtcattaatcaaaatatgtgcaccatccggcagcgcttgctgatgcagtcggatatggcagttggcatccacattgacgattgccagcgagtgatcgcacaaactcagcagctggtgggttatctgcgaggcatcacgcggtaagtcaattaaaatccactggtaacgcccgctggcttttagttgctgtaagccggagcaaatatcgctcagccgggtttgccagtgctgtggattttcttgttcttcaatggataactgaccaaaaggcagcaaatcgagctgcgaggtatagcgtaacccggcgtcacgccagtcctggccatccagcatagctctggcccaaccctgacggtgggtaaaatcaacgttaaatgacaggcgcaacaagttgtccgggcaggcatcgaccaccaggacattttctcccaacatttgtaatgaccaggctaatgcggcggtgatggttgttgtccccacgcctccccgaaccccctgcaatcccagtacggccattcaccaatcccctacttttgttgcgcaaactctgccagcaacggccagcgttttaatgccgcggccaactgttcgcgttgggaaatatcggcataatcaatatcaggcagtgaaaatgcctgctttaacgccaaaatatcattctggaagatatagcctatcgcgggatcaggcagagtatctggttcattgttattcatttttcttgatccctatgaaataaccgtaccgttcatgagacaattctaactgtgagcatttcgtcggtttattgtttacggcgagacgggaatgtgctcactttttgactttccgttacgcaacagaaaaagttaaaaacgaaaagactaaaatcacatgtcttgtgacctgctaaattgattcacatgctaaatctgataagttttaatttcaatggtaggtttatttcttagctttcgctagtaaactgataatcagacaaaatgttgacatgagggacattgtggaccctgtattctctatcggtatctcatcattatgggatgagctgcgacatatgccagcaggcggcgtctggtggtttaacgtcgatcgccatgaagatgctatcagtctggcgaatcaaacaattgcatcccaggctgaaaccgcacacgtcgcggtcattagcatggacagcgatccagcgaaaatctttcaattagatgattctcaagggccgggaaaaataacattattttcaatgctaaatcatgaaaaaggtctatactatttggcccgtgatttgcagtgttctattgatccccataattacctttttattcttgtttgcgcaaataacgcatggcaaaacattcctgccgagcggcttcgctcatggttggataaaatgaataaatggagccggctaaaccattgttcgcttttggtaattaattccggaaataataacgataaacaattttcattgttacttgaggaataccgttcactttttggtcttgccagtttgcgttttcagggcgaccaacatttgctggatattgctttctggtgcaacgaaaaaggggtcagcgcccgtcagcagcttagcgttcagcaacaaaatggttgctggacattagttcaacaccaggaggcggaaatccaaccacgcagcgacgaaaaacgcattctgagtaatgttgctgtactggagggtgctccgccgctatcggaacactggcaactgttcaacaataacgaagtcctgttcaatgaagcccgtaccgctcaggcggcgacggtggtcttttctttacagcaaaatgcacaaatcgagccactggcccgcagcattcatactctgcgtcgccagcgcggtagtgcgatgaaaatcctcgtacgggaaaataccgccagcctgcgcgccaccgatgaacgtttattattggcctgcggtgcaaatatggttatcccgtggaatgcgccactctcccgctgtctgacgatgatcgaaagcgtgcaagggcagaagtttagtcgctatgtgccggaagatatcactaccttgctgtcaatgacccagccgctcaaactgcgtggtttccagaagtgggatgtgttctgtaatgccgtcaacaacatgatgaataaccctctattacctgcccacggtaaaggcgttctggttgccctacgtccggtaccgggtatccgcgttgagcaagccctgacgctatgtcgccctaaccgtaccggcgatatcatgaccattggcggtaatcggctggtgctgtttctctcattctgtcggattaacgatctggataccgcgttgaatcatattttcccattgcctactggcgacattttctcaaaccgaatggtctggtttgaagatgatcaaatcagtgccgagctggtgcagatgcgcctgcttgccccagaacaatggggcatgccgctgcctttagcgcaaagttctaaaccggtcatcaatgccgagcacgatggtcgccactggcgacgaataccagaaccaatgcgactgttagatgatgctgtggagcgctcatcatgatgaccatcagcgatatcattgaaattattgtcgtttgcgcactgatatttttcccgctgggctatctggcgcggcactctttgcgacgcattcgcgacaccttacgtttgttctttgctaaacctcgttatgttaaaccggccgggacgttacgccgcacggaaaaagccagggcaaccaaaaaatgactcaatttacgcaaaataccgccatgccttcttccctctggcaatactggcgcggcctttccggctggaacttctattttctggttaagttcggcctgttgtgggcgggatatcttaacttccatccgctcctcaatctggtgtttgccgcgtttctgctgatgcccattccgcgctacagcctgcatcgcttgcgccactggattgccctgccgatcggctttgctttgttctggcatgacacctggttgcctggcccggaaagcataatgagccagggttcgcaggtggcggggttcagtaccgattatttaatcgatcttgtcacacgctttattaactggcagatgattggggccatttttgttttattcgtggcctggttattcctgtcacaatggattcgcattaccgtttttgtggttgccattctgctatggctgaacgtacttaccctggcgggaccaagtttctccttgtggccagccggtcaaccgacgaccactgtaacaacgacgggtggtaacgcagcggcaaccgttgcggcgacgggtggcgcaccggtagtgggtgatatacccgcacaaactgcaccgccaacaacagcaaaccttaacgcctggctgaataatttctataacgcggaggcgaaacgtaaatcgatcttcccgtcttcgctgcccgctgatgctcagccatttgaactactggtgattaatatctgttcgctttcctggtcggatattgaagccgccggattgatgtcgcatccactgtggtcgcatttcgatattgagttcaagaactttaactccgccacctcctacagtggcccggcggcgatccgtttactgcgcgccagctgcgggcagacttcgcacactaatctgtatcaaccggcaaataacgactgctatctgtttgataacctgtcgaaactgggctttacccagcacctgatgatgggacataacggccagttcggcggttttttgaaagaagttcgcgaaaatggcggcatgcagagcgaattgatggatcaaacaaatctgccggttattttgctgggctttgatggttcgccggtttatgacgataccgccgtgcttaaccgttggctggacgttaccgaaaaagataaaaacagccgtagtgccacgttctacaacacgcttccactgcatgacggcaaccattatccgggcgtcagcaaaacagcggattacaaagcgcgggcgcaaaaattctttgatgaactggacgccttctttactgaactggagaaatcgggtcgtaaagtgatggtggtcgtggtgccggaacacggcggcgcgctgaagggcgacagaatgcaggtatctggtctacgtgatatccctagcccgtctatcacagacgtccccgttggggtgaaattcttcggcatgaaggcaccacatcagggggcaccgattgtcatcgaccaaccgagcagcttcctggctatctccgatctggtggttcgcgttcttgatggcaagattttctccgaagacaatgttgactggaaaaaactcaccagtgggttgccacaaacagcaccggtctccgagaactcaaatgcagtagttattcaataccaggataaaccgtacgttcgcctgaacggcggcgactgggtgccttacccgcagtaagaacgaaaaaggccgcagagtttccccctgcggcctgatccgggcgcaaattgccattacggcagcctgacgcccgcatgacacgttacttccgcttattcagccagttcacgatcatactggcaagaatgccagcaatgaccggagccgctaaatcatgccagaaggccatgcccagttctgcgagcgtcatatagccgcctgtgttgtaatgacaacgtttcgcggctattcttgagttgtttgggttcaagattagcccccgtgatgttgtcaggtgcatacctgcaatatgcgggggttttctctctccagcaaccaatgccaccagggattaagcccccgcaacattgcgcctcaccggaacccttccggcttgccgctgattctacgactgtttttctgttccggaatccgtcacgtcttcactctgtgctgcgcattccgcagaatattatccgcttgcaaccgttgcatttttcttacgaaaaaggccgcagagttttatccctgcggcctgatccgggcgcaaattgccattacggcagcctgacgcccgtctggcacgttacttccgcttgttcagccagttcacgatcagactggcaagaatgccagcaatgaccggagccgctaaatcatgccagaaggccatgcccagctctgcgagcgtcatatagccgcctgagttgtaatgacaacgtttcgcggctattcttgagtggtctaggttcaagattagcccccgtgatgttgtcaggtgcatacctgcaacgtgcgggggttttctctctccagcaaccaatgccaccagggataaagcccccgcaacattgcgcctcaccggaacccttccggcttgccgctgattttacgattgttttttgccgtcagcacccggcaatcttcctcattgcgtgatgccttccagcttaatttctttatttgcaatagttgcagctcatatccgggctgactccagactagtagtgaaatgcgcaattttgtagaattgcgcctcctcgcgacctccccagtgaatctgttgcctcattttttacatactgcgtattcgacttctccacctgttgcgcaagagaaactgggtttattcatttttgcgaggccgacttctttctggacaggactttatgcagcacaacacactaccgaaacacgatcagaaattgccgtttacacgctacgacttcggctgggttttattatgcataggcatggcgattggtgccggaaccgtgctgatgccagtacaaattggcttgaagggaatttgggtatttattaccgcagcgatcattgcttatcctgccacctgggtagtacaggacatttatttaaaaaccctttctgaaagcgattcctgtaatgactacaccgatattatcagtcattacctggggaagaactggggaattttcctcggggttatctactttttgatgattatccacgggatttttatctactctctctccgtggttttcgacagcgcctcgtacctgaaaaccttcggtttaaccgatgccgatctttctcaatctctattttataaagtcgccattttcgccgtactggtggcgattgcgtctggtggtgaacgattactgtttaagatttccggaccaatggtggtggtcaaagtggggattattgtcgtgttcggttttgcgatgatcccgcactggaatttcgccaatataaccgccttcccgcaagcctccgactttttccgcgatgtcctgcttactattccattttgcttcttttccgcggtatttattcaggtacttaacccaatgaatattgcctatcgtaaacgggaagcggataaagtactggcaacccggctcgcgctgcgtacccaccggattagctatatcacgctcattgcggtgatcttgttttttgccttttcgtttaccttctcaattagccacgaagaagccgtttctgcctttgaacaaaatatctcggcactggcactggccgcgcaggtgatccctgggcatatcattcatatcacctctacggtactgaatatctttgccgtactgactgcattctttggcatttatctcggtttccacgaggccattaaaggcattattctcaatctgttaagccgaattattgataccaggaaaattaactcactcgtgctgactctggcgatctgcacttttatcgtcattacgttgacgatttgggtttcgtttcgtgtatcggtgctggtgttctttcagttgggaagcccgttatatggcattgtgtcgtgcctcattccgtttttcctgatctataaagtctcacaactggaaaaacttcgcgggtttaaagcctggatgattctgctgtacggcattttgttatgcttgtcgccactgttgaagttgattgagtaaaccggagcgcatggccccggttttgtgagttaacgctgcggattttcatcctgatcaacagcaaaacaggctaccagttgaccgccgtagtcttttagctgcggctgcaactgggtgcaggggccgaagcgccgacgacagcgggcgttgaaggcgcagcctggcggtggattcagcgggcttggcagttcaccggtaagtttgatgcgttcgcgacgatcgtccgggttcaggcgtggtgtcgcggagagcagcgcctgagtgtacgggtggcgcgggttattgaagatttggtccttcgtccccttctccacgcagcggcccaggtacatcaccatcacttcatcagcaatgtgctccaccaccgacagatcgtgggagataaagacataagatagccccagttcctgctgcaaatccatcatcagattcagcacctgcgcacgcactgagacgtccagcgcggaaaccggctcatcggcaatcaccacatccgggtcgagcatcagacctcgggcaatggcgatacgctgacgctgaccgccggagaacatatgcggatagcggtcgtaatgctcggttttcaggccgactttcgccatcatcgacagggctttttcccgacgctgttctttgcttaagctggtgttgatcagcagcggctcttcgagaatctgcccaacttttttacgcggattcagcgaaccgtaagggttctggaagacaatctggattttctgccgacgtagcttctgcgcctgcggatcgtgcttgagcagatcctgcccctggtaatacagttcgccgccggtgggcgtttcaatcatcgtcagcaaccgaccgagggtcgatttaccgcagccagattcacctactactgccagcgttttgccacgttcaaggttaaacgaaacgccatccagcgccttcaccagacgttccggcgcgaacatgcctttcttcaccggataatgttttttcaggtcgatagcctgcaacagcggttgttgcgaggtggcctcatgcgtactcatagtgtcggcctcccggcatcatcaagtgggtaatggcatttggactgacgcccgtcagcgagcatattcagcgccggttcttcagcacggcatttgtcagtggcgtaggggcagcgcgggttaagcaggcagccgttcgggcggtcgtacttgccgggaacgacacctggcaacgacgccagacgttctttgtcctgagcaaattccggcagcgcacgcagcaatgcctgagtatacgggtgacgcggcgcatggaagatagcgtgcgcatcgcccgtttctactacctggcctgcatacatcacgataattttatgtgccgcttccgccaccagcgccaggtcatgggtaattaacaccagcgccatgttctctttctgctgtagctccagcagcagttcgataatttgcgcctgaatggtcacgtccagcgcagtggtcggttcatcggcaatcagcagttttggtcgacaggcaatcgccatggcgatcatcacgcgctggctcatgccgccggaaagctgatgcgggtaaacatccagacgcgatgccggatcgggaataccgaccagattcagcaggtcaatcgctcgctgacggcgggtacttttgttgccgccttgatgcaccttaatcgcttccataatctggaaacccacggtgtagcacgggttaaggctggtcatcgggtcctggaagatcattgccacttcggcacccaccaggttgcggcgctctttttctgagatacgctgcaaatcctgaccgttaaactccagcttttccgccattacgcggcccggataatcaatcagccccataattgccagcgaactgaccgatttaccagagccggactcacccacaatcccgaccacttcaccctgttttacgctgtagctgatgcggtctacggcgcggaacggtgcgctttcgtcgccgaaatgcaccgataatttatctacatttaataacgccatctcgaacctcttactgcttcagtttgggatcgagcgcgtcacgcagaccgtcacccatcaggttaaatgccagcaccgtcagcaggatcgccagacccgggaaggtcacgacccaccaggcgctttgcgcgaactgcaacacatcagagagcatggtgccccactccggcgttggcggctgcgcgcccatgccgaggaaaccaagagcagccatatcgagaatggcgttagagaaaccgagcgacgcctgaacaatcagcggcgcaaggcagttcgggaagatgttaataaacatctggcgcattgccccggcacccgccacgcgagacgcggtgacgtaatcgcggttaacttccaccagcacggcggcgcgggttaagcgcacataatgcggcagcgcaacgaaggttagcgccagcgcggcgttaccaatcgacgggccgaaaatcgccaccagcaccagtgccagcagtagacttggcagcgccagcatgatatcgaccacacgcatgatgatgttatcgaccagaccgccaaagtaaccagcgatcaggccgagaataacgcccataatcagcgataacaccactaccagacagccaaccagcagcgacaagcgcgcgccgtacatcagccgcgacagcacatcacgccccacgtcatcagtgcccagcaagtgcgccatgctgccgccttcctgccaggctggcggggcgagcagtgcatcgcggaactgttccgctgggttatagggtgcaatccagttggcaaagatcgcgataaacagcacgatgacgacgtaaaccagcccgacaaccgcgcctttgttgcgtttaaaatagtgccagaactcctgtaacggggtcatcggcaccggtgcgctaatcactttattttcagtaacctgtgacatgatgtccccttacttcttatgacgaatacgcgggttcaccacgccgtacagcagatcgaccagcaggttgacgaggataatcatcgtcgccaccagcaatacgccgccctgcactaccggataatcgcggcgttgcagtgcgtcaatcaaccagcgccccagaccgggccacgagaagatggtttcagtcagaatcgcccccgccagcaatgttcccacctgcaggccgataacggtcaccaccggcagcatcgcgttacgcagcgcatggacgataatcacccgcatccgggtaagacctttggcacgcgcggtgcggatataatcttcgcccagcacttccagcatcgaggagcgcgtcatacgcacaatgaccgccagcgggatggtacccagcacaatggcgggcaggatcatatgggcgacggcatcgataaagttaccgtcttcaccccagatggcggtgtcgatcagcataaaaccggttaacggattggaatcatcgaggaacaccatgtcgctcacacgaccggagacaggcgtcaggttccagtgcaccgaaaccagcatgatcagcatcatgccccaccagaaaattggcatcgagtagccggtcagcgccaggccaaccgctgtgtgatcgaaaatggaaccacgtttaaccgcagccagcacaccaaccggaatcccgactgcggtcgcaaaaatcatcgcgcagacgccaagttccagcgtggcctgaaagcgcggcacgaactcttcccataccggaattcggcttttcatcgaaatgcctaaatcaccgtgcattacgccccaaatgtaatggagatactgctgccacatcggtttatctaagccgagttcagccagcaattgcgcgtgacgctctggggagatcccacgttcgcccgccatgatcatcaccggatcgcccgggatcatgtggacaaaggcaaatgtgagaagggtaataccgataaacgtggggatgacgagtcccaaacgtcggagaataaactgcaacataacccggattctctataatgacccgcagcctggaactgcgtgtctgtattgctcacaaatcaattcccgcccttgtgggacagggaatgaagtattgctgccggatggcgctgcacgcagaggcacagcgccaccgggtatgcagattgttgacaaagagcgctttgtttatgccggatgcggcgcaaacgccttatccgacctacaaaatcgtgcaaactcaatacattgcagagttttcgtaggcctgataagcggagcgcatcaggcagttttgcctttgccatcagtcttgtatggctttaattattcgatagagacattttcgaagtgatgtttgcctaatggatcaaccacatagcctttaacttctttgcgtaccggttcaaacacggtggagtgagcgatgatcagtgccggagcctgatcgtgcatcacgacctgtgcttgtttgtacagttcaacacgtttattgtggtcgtcggtagcacgcgccggttgaatcagatcttcaaacggtttgtagcaccattttgagtagttggagccttgttcagaggcggcgcagctgaacagggtggcgaagaagttatccggatccccgttatcgccagtccagcccatcattaccgtctgatgctcgccatctttcgcacgcttgaggtactcaccccattcgtaggtgacgattttggcctgcacgcccactttcgcccagtctgcctgaatcatctccgccatgcggcgagcattcgggttatacggacgttgtaccggcattgcccacaggtcgatggagaaacctttttccagacccgcttctttcagcaaggctttcgctttttcaggatcgtaagtgtagtcctgaacgtcgtcgttatagccccacatggttggcgggatcaggtttttcgctgatacgcccgcgccctgataaaccgctttgatgatagcgtctttgttcaccgcgtaggtcagagcctggcgaactttcacgtcatccagtggttttttctgcacgttatacgagagataaccgacgttcagccccggcatttccatcaggttgatggatttatcctgcttcatgcgggcgatatctgccgggttcgggtacggcatcacctggcattcgttcttctgcaatttcgcgtaacgcacggaagcgtcaggagtaatagagaagaccagcgtatcgatcttcggtttggtgccccagtagccatcaaacgctttatagcgaatacgggaatctttctggtactgctgtaactggaacgggccggtaccgattgggttgaggtccagtttttccggtgtaccggctttcatcatcgcgtcagcatattcttttgacagaatagaggcgaagtccattgccaggtcagcgaggaacggcgcttccgggcgagtcagcacaaactgaacggtgttatcgtccacctttttcacttcgctgattagctctggcaagcccatgccttcgaagtattcgtagctgccgccagagactttatggtacgggttttgcgcgtttttctgacgatcgaacgagaacactacgtcatcggcattcagttcgcgcgtcggtttgaattctttattgtcgtgccacttcacacctttacgcagatggaaggtataggttttaccgtcttcgctgacttcccacttttcagcgaggcccgggatcacttcagtggtgccgattttaaattcaaccagacggttataaagcggtacggaagaggcgtcataggtggtgccggaggtaaacagctgcgggttaaacccttccggagatccttctgagcaataaaccagagttttagcctgaacacttgctgcgacggtcatagccaccaggctgagaccaagcttcagcatccctgactttttcaaggaaatacgcattattctgctccaattgtgatgtttgttgttttaaccctttgcagtgggttgtcgctgcctgaccttttttgttttttgcccggtcgggtcaacgttatgaggtggggatgccgtactaattaacatcagtgtaacagtgcggatcctccataaaatgcccctcgtgacctacaatctgtcaacagaatgtgaaaacgtcaatacagccaaccgggatttacaccaacggtgagaatccacaaacaaagattaaaaaaacttcaaacagctatttgcagcagagaaatttgtgctactccaacatgaccagaacaatcagcttaatatttagcaacaattggtgattaagttttatgcattttgtgaaaaaaatctgaggaaaaggtggatatctgagcgattaataccatgaacgctaaaacgcacagcggaaaatgccagcgccagccataagtaacgcaaaaaaagatttaagcaaatataaaaaaagacaatggtttctgtcacaaatccgttaatggatagtgagatatggggcgcaaattttgacaggaaatgtgtggtgtgtagatcggataaggcggtcgcgccgcatccgacaatgggccggtacatttgcctgatgcgacgctggcgcgtcttatcaggcctacgtcgagtcgaacctccccgcccccgggggttctcttcctcatgagctacagatgcaaaaaagcctgctcgttgagcaggcttttcgaatttggtcggtgatagaggattcgaacctccgaccccttcgtcccgaacgaagtgcgctaccaggctgcgccaatcaccgaatgcggggcgcatcttactgcgcagatatgccctcgtcaatcccttaatagcaaaatgccttttgatcggcgagaaagtcagcaggcctcttagttagccgccgcctctcttgcctgcgggatgtggcaccagttgttgttttcgttaattccaccatccggtgaagtatagccaagacaacccatgatggtgtcgtacagctctacatgacggcgtggcactttcatgtcggcttcttttttcagctgcgcaaatgcctgcgcattgaccggattttccagatatttatccgacatccagaccatcatcggcacacggaactgttccggcggtgccagttcacgcggcgtgccgtgcaggtgctcgcgttcattaattgactcaccgtggtcagctgcatagaacacaatcgctttcttatcgcgaacctgatcaatcacgctggaaataaagtgatccacataggtcaccgagttgtcgtatgagttgatcatctgcgctttggtacagccgctatcaacaccaatacattccggcttccactgcgcaaagctgcgcgggtaacgctgggtgtagttaaagtgtgagcctttggtatgcagaatgatcagatgcttaccatccgggttgcgccccagcgattgctgcatttcgtctaccagcaacatatcatctaccggcttgccacggttacgtggctccgcaccaatctgctcacgataagcaatgttgtccgccatcgtattgctgtagaaccacatttcgctttgcatagcgtagagatcagaactgaatcctaactgcttcaataccgcgaaaatgttctgttcttttaatgtgcgctgcggattatcttctgctccaccctgacgtacaaacatgcaacgcagtgagagtttggttgcagtatcacaggagtaaccacggaacgccgccagatttttctcctgagccagcttcggtgtggtattgcgttcatagccgaaaatgcccatatgatcccagcgcgtggtttcaccaataatgaaaacgacatatgtatcatcaacgttttgtggagcctggtacgtaaacttcttcgcaggattaaggagagaattgttatcggaagattcatcgacccgcgcccaggcataaagacctaatgccgaaagccagtttgatggcagataagagttcgcgacgacgccgccataactcggcaaatcaacacctgtcgccctctccactttcttctgctggatatccagcaaacgaatcggtgcccaaaccataatacctgccagtacgacgaccgccaggctgcgaatacgttgccctggggttcgcagttgtcggagcaaggtgtaacgacagcggttattccagataaggataagaggcaacgcgcttacggcgattaaccagagaataaagttcagaccaacaacttcttttgacaggtcgatatcggtggtcatgacggatgcgatgatgccataaccaatgactacattaaggaaggtcatgtaatagctggcacctgcggaaaagagcaccaccagcgatgccagaatacgccagctgcggcggccaaacagcgaaagaagacgcagtaaaaagaaggtcaccagtacggtggcggccagttcaacaacagcagaaatacctttccagacggtaaaatcgtgcgcatagctgccgaagcggcggtaaaaaaccgcgccattcataaaaaggccaatatagattgcaagcaagaagctcagcttctgctgtgtaatcgatttgatgtatctcatgcaaacaaaccctggacaaacaggtgataacaccctgcttagtggcttttcaggccaggcaggggaaaagtgcggaggtagtcagataagtaaaatctacacgcgcgaataagtagaccacagcaaagggaaaaagtgtggggaaagagtgtgcacgaagcacaaatttacaaaaatgcaagtttgaaaagagactttagcgttacaaaaagcagtaaaaagggccagctaactggcccaaattttacgcgttattgtttatacatttcgttgatgcgtttgatgcacactgaagctgaagcccagtagctcgcggcagatgattaaagggagccatgcgcctcacgcaacattttctgctctggctggcgaatggtcgtagaaagcgccagtgacagaatcagcagggcgaaaatcacgtagaaagtcacatagaatccgccaaacagtgaagcgataatcgaaccacaaatgctgccgataccgaaaccgaggtaaatgacgccgtagtttttcgccaggttattgaggccgaagaactcactgaccagtgacgggaacaccgtaatcgtgccaccaaagttaaatgccacacaggcaatcgctgcaaagaacgtcactgcattcaatggtgcaaacagcagggcagccatacccaccagcgcaatcacctgaccaatggtgataacacggatacgggcgattttgtcagacagaatgcccagcaccagacgaccagaaaggttggcgatggaaataaccgtcacagcattggctgcggaaattgcatcaagatgcgccaggctttgagcgatatctttcgctacaccaatcacatacagaccactcatgcacgcagtcaggaacataaccgctaacatccagtactgcggtttacgcatcgactctgccagggtgtagtccttctccaccacaccattgctggttttcacttcctgcttcggcgcatctttcattaacgttgcgccaaagacaatcatcaccagtacaatcgcgccccaaataacaaaggttttttccagacccaccgtttcgagcaggtgcgtgtcgataaatttaaaacccaggctgcccagaccataagaaccgatagcaaaagcagagataagtcccttacgctccggaaaccacttcacgcagttagagagcgtcaacaggtaacccgcaccatccgccagaccaaccaacacaccggcgcttaaccacagcatcatcaggttgttggaatgtgctgtcaggaagaaacctaatcccagcaaaatgccggaagccatagtgacgcgtttaacaccaaaacgttcctgcaatttgcccgcaacagaagacgaaattgccagccccagacttaacaagccgaaagagaaagcaacctggcttacaggagcccccagcttggcagaaagcgcaccgttaaacagactccaggtataaaccgaccccagagcaaactgggtaatgatagtaccgatgagtgtcagccagcgagtacgctgataatttgaaggtgtcatggcagtattcctgcagtaataaaaaggaaaaatctctgctgacaaccataacgaagtgcgctttatgcctggggaaaaacggcatgaaatgccatcagaacggaatgaaatgcattagttcaggaatgaatgactcgacaattattcgccaaatttattatttagtaagttagtccccactatcgccacattagttgttatttatgggtttcaattgtatctataacgttaaaatctggcactaacccccatcgtatacagatagtcgctattgttagtggtattttctgcctgagatagcgcagcataggcagcaatattttgattgagcaacatatcagcgcctacggtgacatccagccagttgccgttctggtttgtcgccgtcatccggctcaggcctgattgcgccttccagatattctcgccaaattgctggttatagctgatttgcgcccagggtcgaagatcgccaagccgggagtcaacacgccagcctaaggtactcacgctggcatgccataacggatcggccagcgtggtagtactgtcgccaaactcgttatacatcgaggtagttgtgccatcgtaatgtaatgccgcgaccgggccggttgtaacctgctcatataaaggaaaattccagcccatactcatactgctggtcacatccacaggggtttcttccgccagattgacttccagtcccagcgccctttggctactttgaatacgttgcgacaaaatatcgttgtaatcaggttgatgatcgctatcccaggtgtaacgctctgtggaatgtccgggttgcgtatcaacgatatattcttgttgccaggcgtaagctgtgttgagaaaaaaggcactgattaccacgctcgcaagcaggcttagctgccagcgaccaccgcttttttttatgatcattaacacgactccagggaagagccgaattcggcaatattattgtcattgtatgaaggatatcgggcatagtagccctgtattaaatattgactttttcaccgatgcgtcaagaaaagcggctgaaatttttacgatcgggtacatagcgagggaaagtatggaacgttgcggctgggtgagtcaggacccgctttatattgcctaccatgataatgaatggggcgtgcctgaaactgacagtaaaaaactgttcgaaatgatctgcctggaagggcagcaggctgggttatcgtggatcaccgtcctcaaaaaacgcgaaaactatcgcgcatgctttcatcagttcgatccggtgaaagttgccgcaatgcaggaagaggatgtcgaaagactggtacaggacgccgggattatccgccatcgtgggaaaattcaggcaattattggtaatgcgcgggcgtacctgcaaatggaacagaacggcgaaccgtttgccgactttgtctggtcgtttgtcaatcatcaaccacaggtgacacaagccacaacgttgagcgaaatccccacatctacacccgcctccgacgccctatctaaagcactaaaaaaacgtggttttaagtttgtcggtaccacaatctgttactcctttatgcaggcatgtgggctggtgaatgatcatgtggttggctgctgttgccatccgggaaataaaccatgattcgggaagcgcaacgttcagaactccccgcgctcctcgaactgtggctggaaagtacaatctgggggcatccctttataaaatcgagttactggcgtgactgcattccgctggtgcgcgatgcgtatcttgccaacgcgcaaaactgggtctgggaagaagacggcaagcttctcggttttgtcagtattatggaaggccgatttctggcagcaatgtttgtcgcaccgaaggccgtcagacgcggtattggtaaggcgctgatgcagtatgtgcagcagcgccatccccatctgatgctggaggtttatcaaaaaaatcaaccggcgatagatttctaccatgcgcagggttttcacattgtcgattgcgcatggcaggatgaaacccaactacccacctggattatgagctggccggtggttcaaacgctgtaagtgtcagttccggaccgttgtatttttccagccatgccagcgccgtattacccgcacagccattccccagccgcgagctggggagatctttggtcagcacgttcactgcgccgtttttacaaatgccgtcagcggttaaatccagatctggccatgcgccttcgtgaatacaaatcacgccaggtttaattccctcgctaatgaccgctccggcaagaatttgcccgcgtgagttccacagccgaacagtatcgccatcttgtatgccgcgcgtctgggcatcgtcaggatgaatggtgacaggctcacgatttgccaccgcgtacaattcgcgcagagaactgtaattcagctggctgtgcagacgatgcgccggatgagcagaaagtacctgcaactgttccggttcggcattgccctgccattcgtccggcgccagccacattggatgccccgggcaatccggataagcgtaatcggcaatacgctgcgagaagatttcaatcttaccgctggcggtttttaatggatgcgcctgcggatcgcggcgaaaatcggcgaagcgaataaaccgctcactgtccgggttttccggcatctcaattaactggttggcttgccagaactcagcaaatggcggcaattcaacctgctggcttgccccgcgctgccgggcaacgttataaaacgtttccagccattgcagctcactttttccttccgtaaaacgtgcataaccgcccttctgccaacgttcactcaagtcggcaaaaacatcaaaatcattacgcgcttcatcgcgtggcggcaccacttgcttcatcggcaccagatgctgattactgtaatcaccggtcatggtgagatcattacgctcaaaagaggtggtcgcaggcagaacgatatccgcgtgtttcgccgcagccgtccagaagcattcagagatcaccaccagctccggtttttgccaggcacggatcaggcgattggtatcctgatgatgagtaaagttggcaccgcccgcccaccagataaaacgaatatccgggaaatgtcggtccataccgttatgttgatatgcgccaccagggttttccagtgcttcaacaatgcgggcgacagggattttatctaccgcatcgcagccacccggcaagctgccctgcatggaagagagtaccgcagcgcgccgcgtggggttaccaccattggcaaaatggtaagaaagaccaaaaccgccgccgggtgtgccgatttgccccaacattgctgccagcgtgacgagcatccagtgtttttgctcaccaaactgttggcgctgcattccccagcctgccatcagcatggttgtattttggtggaaaatagccgccagctcgcggattttcgctgcgccaacaccacaaatctctgccgcccattcggcgtttttcgctataccgtcactctcgcccagcaaataagaggcgaagacggcataacctgtggtgcaacgcgccagaaacgcttcgtcgtgccaaccattttccaccagcgtatgggcgatccccagcatcaacgcaacatcggtgcccatgtgtggtgccacccactccattttatcgccaaagaaatcgatggtttccgatcgcattggatcaatgcagatcagctttttcccgctgtcacgcagtgcggaaaagtaagaaagcccctgctcatcggatgcattccacgcaattttcagcgtattgagtgggttagcactccacagcaccacgacatcgctatgttccagcaccagcggccaactggtttgctgttgataaacttcgctgccacccacgacatacggcatgatcgcctgtgccgcgccggtcgaataatcccccagatgcccggtataaccgcctgccagcgccatatagcgttgtaataatgtcgaggccttatgcagcacgccgtttgaacgccagccgtaggaaccagcaaaaatcgatgccggaccataagcctcacgaatgcgtttatgctgatggtgaataagctccagcgcctcatcccaactcacgcgaacaaattcatcctgcccacgaatgccttgcggattttccggtgacgcaagaaagcctttgcgcaccattggaaatcgcacccgcgtattgctgtgaacctggtcgcgaaccgcgctctgcaaggagttttccattcctgtggctaacgcgccacgcgagctaaacacggtttcgccgtcggtttcaaccagcataggcccccagtgggcggcagtcagaacggaatatcgtgaggatgagttggccaaaccgaagactcctgaaaggttagatgtattgagcagttaaatattacttacaaatttccgagtattcccaggaataatcttcatgctcacgcggcataatctcccgccacggaacccgtggcaaagaataaaaaggttattaaggattaacaatgaagaaacgtgtttatcttattgccgccgtagtgagtggcgctctggcggtatctggctgtacaactaacccttacaccggcgaacgcgaagcaggtaaatctgctatcggcgcaggtctgggctctctcgttggcgcgggtattggtgcgctctcttcttcgaagaaagatcgcggtaaaggcgcgctcattggcgcagcagcaggcgcagctctgggcggcggcgttggttattacatggatgtgcaggaagcgaagctgcgtgacaaaatgcgcggcactggtgttagcgtaacccgcagcggggataacattatcctcaatatgccgaacaatgtgaccttcgacagcagcagcgcaaccctgaaaccggcgggcgctaacaccctgaccggcgtggcaatggtactgaaagagtatccgaaaacggcggttaacgtgattggttataccgacagcacggggggtcacgacctgaacatgcgtctctcccagcagcgtgcggattccgttgccagcgcgttgatcacccagggcgtggacgccagccgcatccgtactcaaggccttggcccggctaacccaatcgccagcaacagcaccgcagaaggtaaagcgcaaaaccgccgtgtagaaattaccttaagcccactgtaatccctttcatgtcaggtgatgcagaaatcacctggcattcttcagttttccttcatcatatttcaggctaaggtgatcgccttatcagtgaatggagagaagcatgaagccgtccgttatcctctacaaagccttacctgatgatttactgcaacgcctgcaagaacatttcaccgttcaccaggtggcaaacctcagcccacaaaccgtcgaacaaaatgcagcaatttttgccgaagctgaaggcttgctgggttcaaacgagaatgttgatgccgcattgctggaaaaaatgccgaaactgcgtgccacatcaacgatctccgtcggctatgacaattttgatgtcgatgcgcttaccgcccgaaaaattctgctgatgcacacaccaaccgtattaacagaaaccgtcgccgatacgctgatggcgctggtgttgtctaccgctcgtcgggttgtggaggtagcagaacgggtaaaagcaggcgaatggaccgcgagcataggcccggactggtacggcactgacgttcaccataaaacactgggcattgtcgggatgggacggatcggcatggcgctggcacaacgtgcgcactttggcttcaacatgcccatcctctataacgcgcgtcgccaccataaagaagcagaagaacgcttcaacgcccgctactgcaatttggatactctgttacaagagtcagatttcgtttgcctgatcctgccgttaacggatgagacgcatcatctgtttggcgcagaacaattcgccaaaatgaaatcctccgccattttcattaatgccggacgtggcccggtggttgatgaaaatgcactgattgctgcattgcagaaaggggaaattcacgccgccgggctggatgtcttcgaacaagagccactgtccgtagattcgccgttgctctcaatggccaacgtcgtcgcagtaccgcatattggatctgccactcatgagacgcgttatggcatggccgcctgtgccgtggataatttgattgatgcgttacaaggaaaggttgagaagaactgtgtgaatccgcacgtcgcggactaagccgcgactgcgtggagtaaagcccgataatcgctcgggcttttactctttattgggttgcagtaactgctgtagtccaggcctgattaaacgcctgatgttgtgccggtaatggcgcaatcagtttgttatattcacttgcctgctgtgaagtcgggaactggatgccatttgcgacaaagctcacctgagtaccttgctgagcaatgtagtctccaaccatcaccagttgttgcgtgaaagtttgtgccgccggaatcaacggttgcaatgcatcagctggcgtcgttaccactttggtgaatgcctgatcaaagaccggtttcaggtcatcactctgttttaacgcagagtgcgcagcatcggcctgcaacttcgcattttgcagctgttgcgccagcacacccagcgaaccgttcatttcacgcagcggaccgctttgcgtaacgtaatcctgcggtacgcgaattgcgttaacgctgtctacaaccgggcgcagaccggaatccatcgcctgattcacctgctgagaataaccatacagaatcgcgtaatcagagacaaaaggaccaaactgttttttctgatcggcagtcagggttggtagacgttcaccgctacgcatcactgtattctgcaggaagtcgataaacgctttacgctgatcgccttctttatcaaaacacccactcaggctaactaccattaataacgccgcaagaggcgcaaaccagcgagagcaggactttcctgtcgccattttcttactcctttcacccaaaaaaagcgcacaacgacacacgcgtgtctgacgtgacaaggatagtccaggacaggcttgcaggataccctttctacgtaatcttcctggtaaaatcatggagaaaatgaaacaaggttaatttgttgtttcattgttaaaaaatgatattgccgttgccttttttgtagccagagatttacgccttcgcagaacgttagattttcgaaatctttacaaaccgggagtggtaagagatatatcggcatttatcagatcgttaggtggctataagtcacgctaaatgactggctgaatcgaatcatagtcagagtatgccctgactacaccccgctgtgtctgtttttcccgactattcttaatgagcttcgatgcaattcacgatcccgcagtgtgatttgaggagttttcaatggaatataaagatccaatgcatgagctgttgagcagcctggaacagattgtttttaaagatgaaacgcagaaaattaccctgacgcacagaacaacgtcctgtaccgaaattgagcagttacgaaaagggacaggattaaaaatcgatgatttcgcccgggttttgggcgtatcagtcgccatggtaaaggaatgggaatccagacgcgtgaagccttcaagtgccgaactaaaactgatgcgtttgattcaagccaacccggcattaagtaagcagttgatggaatagacttttatccactttatttctgtttacggtcctgataacaggaccgttttccaaccgattaatcataaatatgaaaaataattgttgcatcacccaccaatgcgtggcttaatgcacatcaacggtttgacgtacagaccattaaagcagtgtagtaaggcaagtcccttcaagagttatcgttgatacccctcgtagtgcacattcctttaacgcttcaaaatctgtaaagcacgccatatcgccgaaaggcacacttaattattaaaggtaatacactatgtccggtaaaatgactggtatcgtaaaatggttcaacgctgacaaaggcttcggcttcatcactcctgacgatggctctaaagacgtgttcgtacacttctctgctatccagaacgatggttacaaatctctggacgaaggtcagaaagtgtccttcaccatcgaaagcggcgctaaaggcccggcagctggtaacgtaaccagcctgtaatctctgcttaaaagcacagaatctaagatccctgccatttggcggggatttttttatttgtttttcaggaaataaataatcgatcacgtaataaaatctattattatttttgtgaagaataaatttgggtgcaatgagaatgcgcaacaccgtaagaaaggcgggaataatttcccgccgaagacgcttactctttcaatttgcaggctaaaaacgccgccagctcataactctcctgtttaatatgcaattcacacagtgaatctcttatcatccaggtgaaaaataaaagcgtgaaacaaatcactattaaagaaagtaatctatatttctgcggcattcccagccccctgtgttgatttccaacgagtaagaggctaaccttatggtgtctatgcatagaggggcctcactttgatttatagtcaggtggggcttttctctgtctgcctttcggtgaatacctgagacaaacagtctcaagcacccgtggctattccagcttaataagttcgtttcttctccttgatataatcctaaaaaaatctcataaaattaatatatgagataatctttattcagcagaagattattaaaggttgctgtattatttagcgataaaaaaagcctgccagatggcaggctttttaataacggcgttattactgcaacagcgaaatatccgcaacgcgcaggaacagttcgcgcagtttttccagcatggtcagacggttgatacgcaattctttatcatcaaccatgaccatcactttatcgaagaaagcatcgaccggttcacgcagctcagccagttcgaccagcgcatcctggtaacgaccttccgcaaagtacggctccagcttgtcacgtagcaccacaacctgcatagccagcttaatttcttccggctctttcagagtagaggcattcacgcgatcgctcagcacttcgtcagatttcgccagaatgttagatacacgtttgttcgccgccgccagtgctgcagctgcttccagggtacggaagtgcgataccgctttcatacgggcatcgaaatcagccggacgagtcggacgacgcgccagtaccgcctggatggtgtcaacggtgtaaccttcgtcctgataccaggcgcggaagcgaccgagcataaagtcgataacatcatcaaccacgttggcgttagtcagcttatcgccatacagacgcactgcttcttcggtcagcgtttgcagatcaaggttgaggttcttctcaacgataatacgcagcacgccaagtgcggcacgacgcagcgcaaacgggtctttgtcgcctttcggatgctggccgataccgaagatacccgccagggtatccatcttgtcagcaatcgccagcgcacaggctaccgggttagacggcaggtcatcaccggcaaagcgcggctgatactgctcattcagcgcgacagctacgtcttccgcttcgccatcgtgacgcgcgtagtgcatccccataacgccctgggtgtcggtgaactcgaagaccatgttggtcatcaggtcacacttagacagcaggcccgcacgggtagcgtggttaacgtcagcgccaatctgctcagcaatccagccagccagcgcctgaatgcggtcagttttgtcgcgcagcgtccccaactgttgctggaacaacacggtttgcaggcgcggcaggttatcttcaagacgttttttacggtcggtattgaagaagaactcggcatccgccagacgtggacgaacgactttctcgttaccggagataatctgctgcggatctttcgattcgatgttggcaacgaagataaagttcggcagcagtttgccgtcgttcgcatacaccgggaagtacttctggtcacctttcatggtgtaaaccagcgcttcagacggcaccgcgaggaatttctcttcgaattttgcggtcagcacaaccggccattccaccagcgaagccacttcttccagcagactttcgcttaagtcagcgttaccgccaatcttacgtgctgcttcttcagcatcggctttaatcttcgccttacgttcttcgtaatcggcgatgactttcccgcgctcacgcagaatttccggatactgatcggcattgtcgatagtgaattccggctcgcccataaagcggtggccgcgaatcacgcgatcggactgaatacccagaatggtagccggaataactttgtcgcccagcagcagggtcacggtgtgaaccggacgcacgaagtgcacgtcgcttgcgccccaacgcatcagtttcgggatcggcagtttcgccagcgaagtcgcaaccatattcggcagcagtgcttcggtgctttcacccttcacatgggcgcgatacagcagccattcgcctttatcggtagtcagacgctcagcctggtcaacggtaataccgcaaccacgcgcccaaccttctgccgctttgctcggtttgccttcagcgtcgaacgcctgggcaattgccgggccgcgtttttctatttcgcgatccggttgcgcctccgccaggttagcgactttcagcgccagacgacgcggagcagcaaaccattgaacggtgccgtgtgcgaggccagcgttatccagctccgcagtaaagttcgcagcaaaggactcagccaggctgcgcagtgcttttggtggcagctcttcagtgccgatttccaccagaaaagttttctcagacatagccgcctcttacttatctttgttgcacatcgggaagccgagggcttcacgggaagcgtagtatgcttctgccactgctttggtcagggtgcgaatgcgcagaatatagcgctgacgctcggtgacggagatggctttacgcgcatccagcaggttgaagctgtgggcggctttcagaatacgctcgtaggctggcagcggcagcggattttccagcgccagcagttgctgcgcttctttctcgtactgctcgaagcaggtgaacaggaagtccacatccgcgtattcgaagttgtaagtggactgctccacttcgttctgatggaacacgtcgccgtaggtggttttacccagcgggccgtcgctccagaccaggtcgtaaacgctgtctacgccctgaatgtacatggccagacgttccagaccgtaggtgatctcaccggtaaccggtttacattccagaccaccaacctgctggaagtaagtgaactgcgtcacttccatgccgtttagccacacttcccagcccagcccccaggcacccagcgtcgggttttcccagttatcttccacgaaacggatgtcgtggatggtcgggtccatgcccagctctttcagagaaccgaggtacagctcctgaatattgtccggcgatggcttaatgaccacctggaactgatagtagtgctgtaaacggttggggttttcgccgtagcgaccatcggtcgggcgacgagaaggctgaacataagcagccgccatcggttctggccccagcgcgcgcagacaggtcattgggtgagaggttcccgcgccgacttccatgtccaatggttgaacaatggtgcagccctggcgagcccagtaatcctgtaaggtcaggatcaagccctggaaggtcctggtatcaaacttttgcatattatttcgtgctggatacgtgtggatttaaaggaagggatcagtatacccgctggatggaagatatacagtacgaaacgggaaaaagcagggcttaacgcatggaaagatgcaaaaaatggccatccgcgtcaaaagaacagacaaactgctctttccggaaggtataaccgcgcatttcatagcttccctggaactgttcgaaggcggtgacgtcgattttttgctcgccggtgttataacgttttgccgcctgatccttgcataacgcttccatattcaacgaacgcagaggatcaacctttacccgttgtgctttctgcacgggtggcggtgtagaacaacccactagcacaataagcgccattgctggaaagaaagcgttcatcatcattaaattaccgtctggtttgcaggtgagtcttattatttatatcggtatagtggctgatatcttacgaatttccttaagcctctataagctgtagtgataaaactcagattattccagtgcgccaactgaatgatttatcggtcagactttttttaaccagatacagagacacagatgcagcccaaaatttactggattgataacctgcgagggatagcgtgtttaatggtggtgatgattcacaccactacctggtatgtgaccaatgctcatagtgttagccccatcacctgggatatcgccaatgttctgaattctgcctctcgtgtcagcgtgccgctatttttcatgatttccggctatctcttttttggcgaacgcagcgcccagtcgcgccatttcttgcgtatcggcttatgcctgtttttttatagcgcaatcgcgctgctctacattgcgctgtttacctccatcaatgtggagttagcgctgaaaaacctgctgcaaaagccagtgttttaccatttatggtttttcttcgcgattgcagtgatttatctggtttcaccgctgattcaggtgaagaacgtcggcggaaaaatgttgctggtgctaatggtggtgattggtgtcatcgctaacccaaacaccgtgccgcagaaaatcgacggttttgaatggctgccaattaacttatatatcaatggcgatactttttactacatcctttatggcatgttgggccgcgctatagggatgatggacacacagcataaagcactgtcgtgggtgagcgccgcactgtttgcgacgggggtttttattatctctcgcgggacattatatgaattacagtggcgcggaaattttgccgatacctggtatctttactgtgggccgatggtttttatctgcgcaatcgcgttattgactctggttaaaaacacgctgtatacgcgtactatttgcggacttggcttaatctcccgccattcgttaggtatatacgggttccatgcattgattatccatgcactgcgcacccgggggattgagcttaaaaactggccaatactcgatattatttggatcttttgcgcgaccctggcagtgagtttattactttctatgctggtacaacgaatcgacagaaacagattagtgagttaagtagaagcccggtcacattggactgaccgggcttatgtgaattattcgctgtattcttcctgggtaacctgtgtttcttttggtgggtttattccggcatcacgaatattcttctgcaccgctactgcaccaaacaagcttaagaagaaagccagcccataaaagcctttttcgctgagtaataacgttgcattccatagacctaccagcaacaacgcaacagagataataaagaccgtcaggcaagtcatataataaatgggggtggtaggtatgccttcatacttgtcccgaacggtcttttgataagacgccgcggaaaacaaacctaataccagtacggcaaaataataccctttttcatttaactgcatctctgcattccatagtcctaacagataggtaacaataccgccaataagggctacccatgaaacaatactaaatgccggagaataggttgatattttgttgtccatcacagtattcctttcattcctgaatgtgtaagaactttatgttgctcatgccgagcgaaacaaacgcatttgaccaaacaagcagacaaaaaaggcgatggggtagatcaccatttcataagcattgataggtgcgtttaaaacaccgataaacaagagaccgatagtgattaacgctaccaactgacagacgtggataaaaaaatcatccagttgcccaagtttttctgcgcgaagatatgcatagttgccaaaagttgccgtcattaacacgccaagaaaataaccttttccacttaacaatgggcatgagatccatagcccaaccagataaaccagcgccccgacaacaaataatagttttgccacagtctttgaggttttcataacgatctccatatctaccagcgatacattacgagtaaccaacgaaagacaaaactgaaaaatgccattaacaaatgattttcagaataaattcatactaaatattaattaattatttatatatatagatgtgaattatcccccacccggtcaggcaggggataacgtttacgccattaatggcagaagttgctgatagaggcgacggaacgtttctcgtcgtggctgataagcggcataacactgcgcatctggtagatgcgactgttctaacggtagttgcggcaacaactcaatgagcgatttctctggattcgccgcaatctgcgccagccttgctgcgcccagtgctggccccacatcgccacccgtgcggtaatccagttgctgaccgctgatgtccgccagcatttgacgccagtactcactacgcgccccgccaccaatcaacgtaacactttgcggtttaatgccgcaggcatgcacgacatccatgccatctgccagcgcataacccacgccttccagcactgctcgcgccagttcattggggccatgttgatgagtcaaaccaaagaaaacccctttcgcctggggattattgtgtggtgtacgctcgccggaaagataaggcagaaaccaaactggctcggcactttcatcagcctgtcgagctgcagtgattaaagcagggacattgctcaggccggttaatttcgcggcccaatccagacacgaagccgcactcagcattacagacattaaatgccaacgttgcggtaacgcatggcaaaagctatgtacggcgctttctggcttgcttaagaacccttcgctgacagcaaaatagacccccgacgtccccagcgataacattgcctgattagcatcaaccattcccacaccaaccgcaccagctgcattgtcgccaccgcctgcgataactggcaccgccgccataccccacgctttcgcaacttcaggtaacaaagcaccagtaatttcgctgccttcgtataatgcgggcatctggtcacgagataagtggcaagcctgcagcatgagatcgctccagtcacgctttgcgacatccagccacatagtgccagctgcgtcagacatatcgctggcaaactcccccgtcatacgcagacgcaagtaatctttcggtaataatactttatcgatttgacggaatatctccggctcatgccgctgaacccatagcaatttaggcgcagtaaatccgggcatcatcaggttgccggtaatcacccgcgattgcggaactcgcgcttccagcaaagtgcactcttgcgcacagcgcccgtcgttccacaaaatggcagggcgtaacacccgttgctgagcatccagtaaggttgcaccgtgcatctgtccggcaatacctaatgctttaacgtcttgcagagaatgctgaacgcccagagctttcattgcgcgatcagttgcctgccaccactgttccgggtcttgttccgaccagagtggatgcgggcgcgaaacggtcagcttttccgtttgcgcagcaaccacctcaccctgctcgttgagcaaaataacttttacgcccgaggtgccaagatctatcccgatatacatatcgatcgttccttaaaaaaatgcccggtatcgctactgataaccgggccaacggactgcacagttagccgttatttgtcgaacagataatgatttaccagattttccagttgctcctggcgaccactctgatgcaccggagacaaattatgttcctgagcatatttggctaaatctgccagtgacatttggcctttcaggatttgctggcctaattcactattccagccggaataacgctgcgcgatgcgtttatccagctcgccatcttcaatcatgcgcgctgcaattttcagcgccaacgccatcgtatccatcgcgccgatatgaccgtaaaacagatcatatttatcagtactttgacgacgtactttggcatcgaagttcagaccaccggtggtgaaaccgcctgctttgagaatttcatacatcaccagcgcattctcttccacactgttcgggaactggtcggtgtcccagcccagttgcgcatcgccacggttggcgtcgacagaaccgaacaggccaagcgcaatggcggtggctatttcatgatggaaagagtgacctgccagcgtcgcgtggttagcttcaatattcagtttaatctctttttccagaccaaactgtttcaggaagccatagaccgtcgcagcatcgtaatcatattgatgtttggtcggttcttgcggtttcggttcgataagcaacgtgccctggaaaccgattttatgtttatgctcaaccaccatctgcataaagcggcccagctgttcacgctcctggcgcaagtcggtatttaacagcgtttcgtaaccttcacgacccccccacaggacatagttttcaccgcccaatttatgggttgcttccatcgctgtaacaacttgcgttgccgcccaactgaagacttcaggatctgggttcgtcgccgcacccgcgccatagcgagggtttgtaaagcagttagcagttccccacagcagcttcacgccgctctcttcttgcttgcctgccaggacatcaaccatttgcgcaaaattattgatgtactcttttaacgacgcgccctcaggggaaacatccacatcgtggaagcaataaaatggcacatgtaacttgtggaaaaactcaaatgcgacatctgctttacgcttcgccaacgccagtgcctcaccaggctgctgccacggacgattaaacgctcccacaccaaacatatccgccccgttccagcagaaggtgtgccagtagcaggcggcaaaacgcaagtgctcttccatacgcttgcccaacaccagttcgtcgggattgtagtgacggaatgctaacgggtttgaggattttgagccttcataacgaacgcgatcgagctggtcaaaataggcttgcatattgaactccataatcaggtaatgccgcgggtgatggatgatgtcgtaatattgggcactccctttcagttgctcaattatgttatttcacactgctattgagataattcacaagtgtgcgctcgctcgcaaaataaaatgggatgatgaaactgggtaattcctcgaagagaaaaatgcaataagtacaattgcgcaacaaaagtaagatctcggtcataaatcaagaaataaaccaaaaatcgtaatcgaaagataaaaatctgtaattgttttcccctgtttagttgctaaaaattggttacgtttatcgcggtgattgttacttattaaagctgtcctctaactacagaaggccctacaccatgaaaataaagaacattctactcaccctttgcacctcacttctgcttaccaacgttgcggcacacgccaaagaagtcaaaataggtatggcgattgatgatctccgtcttgaacgctggcaaaaagatcgagatatttttgtgaaaaaagcagaatctctcggcgcgaaagtatttgtacagtctgcaaatggcaatgaagaaacacaaatgtcgcagattgaaaacatgattaaccggggtgtcgatgttcttgtcattattccttataacggtcaggtattaagtaacgttgtaaaagaagccaaacaagaaggtattaaagtattagcttacgaccgtatgattaacgatgcggatatcgatttttatatttctttcgataatgaaaaagtcggtgaactgcaggcaaaagccctggtcgatattgttccgcaaggtaattacttcctgatgggcggctcgccggtagataacaacgccaagctgttccgcgccgggcaaatgaaagtattaaaaccttatgttgattccggaaaaattaaagtcgttggtgaccaatgggttgatggctggttaccggaaaacgcattgaaaattatggaaaacgcgctaaccgccaataataacaaaattgatgctgtagttgcctcaaacgatgccaccgcaggaggggcaattcaggcattaagcgcgcaaggtttatcagggaaagtagcaatttccggccaggatgcggatcttgcaggtattaaacgtattgctgccggtacgcaaactatgacggtgtataaacctattacattgttggcaaatactgccgcagaaattgccgttgagttgggcaatggtcaggagccaaaagcggataccacactgaataatggcctgaaagatgttccctcccgcctgctgacaccgatcgatgtgaataaaaacaacatcaaagatacggtagttaaagacggattccacaaagagagcgagctgtaagcgttacgccccggcgcggagcgggggcgtgatttctctccatgccgcgtgaattgattggcttaggtggagtcgttatgccttatctacttgaaatgaagaacattaccaaaaccttcggcagtgtgaaggcgattgataacgtcagcttgcggttgaatgctggcgaaatcgtctcactctgtggggaaaatgggtcaggtaaatcaacgctgatgaaagtgctgtgtggtatttatccccatggttcctacgaaggcgaaattatttttgcgggagaagagattcaggcgagtcacatccgcgataccgaacgcaaaggtatcgccattattcaccaggaattggcgctggtgaaagaactgaccgtgctggaaaatatcttcctgggtaacgaaataacccataatggcattatggattatgacctgatgacgctacgctgtcagaagctgctcgcacaggtcagtttatccatttcacctgatacccgcgttggcgatttaggacttgggcaacaacaactggttgaaattgccaaggcacttaataaacaggtgcgtttgttaattctcgatgagccgacagcctcattaactgagcaggaaacgtcggttttactggatattattcgcgatctacaacagcacggtatcgcctgtatttatatttcgcacaaactcaacgaagtcaaagcgatttccgatacgatttgcgttattcgcgacggtcagcacattggcacgcgtgatgctgctggaatgagtgaagacgatattatcaccatgatggtcgggcgagagttaaccgcgctttaccctaatgaaccacataccaccggagatgaaatattacgtattgaacatctgacggcatggcatccggttaatcgtcatattaaacgagttaatgatgtctcgttttccctgaaacgtggcgaaatactgggtatcgccggactcgttggtgccggacgtaccgagactattcagtgcctgtttggtgtgtggcccggacaatgggaagggaaaatttatattgacggcaaacaggtagatattcgtaactgtcagcaagccatcgcccaggggattgcgatggtacccgaagacagaaagcgcgacggcatcgttccggtaatggcggttggtaaaaatattaccctcgccgcactcaaaaaatttaccggtagtattagccagcttgatgacgcggcagagcaaaaatgtattctggaatcaatccagcaactcaaagttaaaacgtcgtcccccgaccttgctattggacgtttgagcggcggcaatcaacaaaaagcgatcctcgctcgctgtctgttacttaacccgcgcattctcattcttgatgaacccaccaggggtatcgatattggcgcgaaatacgagatctacaaattaattaaccaactcgtccagcagggtattgccgttattgtcatctcttccgaattacctgaagtgctcggccttagcgatcgtgtactggtgatgcatgaagggaaactaaaagccaacctgataaatcataacctgactcaggagcaggtgatggaagccgcattgaggagcgaacatcatgtcgaaaagcaatccgtctgaagtgaaattagccgtaccgacatccggtggcttttccgggctgaaatcactgaatttgcaggtcttcgtgatgattgcagctatcatcgcaatcatgctgttctttacctggaccaccgatggtgcctacttaagcgcccgtaacgtctccaacctgttacgccaaaccgcgattaccggcatcctcgcggtaggaatggtgttcgtcataatttctgctgaaatcgacctttccgtcggctcaatgatggggctgttaggtggcgtcgcggcgatttgtgacgtctggctaggctggcctttgccacttaccatcattgtgacgttggttctgggactgcttctcggagcctggaacggatggtgggtcgcgtaccgcaaagtcccttcatttattgtcaccctcgcgggcatgttggcatttcgtggcatactcattggcatcaccaacggcacgactgtttcccccaccagcgccgcgatgtcacaaattgggcaaagctatctacctgccagcaccggcttcatcattggcgcgcttggcttaatggcttttgttggctggcaatggcgcggaagaatgcgccgtcaggctttgggtttgcagtctccggcctctaccgcagtagtcggtcgccaggctttaaccgctatcatcgtattaggcgcaatctggctgttgaatgattaccgtggtgttcccactcctgttctgctgctgacgttgctgttactcggcggaatgtttatggcaacgcggacggcatttggacgacgcatttatgccatcggcggcaatctggaagcggcacgtctctccgggattaacgttgaacgcaccaaacttgccgtgttcgctattaacggattaatggtagccatcgccggattaatcctcagttctcgactcggcgctggttcaccttctgcgggaaatatcgccgagctggacgcaattgcagcatgtgtgattggcggcaccagtctggcaggcggcgtcgggagcgtggctggagcagtaatgggggcattcatcatggcttcactggataacggcatgagtatgatggatgtaccgaccttctggcagtatatcgttaaaggtgcgattctgttgctggcagtatggatggactccgcaaccaaacgccgttcttgattttgataaaaattttctcaaagccggtaacgtattaccggttttgagtttttgcatgattcagcaggaaaagaaccatgtttactaaacgtcaccgcatcacattactgttcaatgccaataaagcctatgaccggcaggtagtagaaggcgtaggggaatatttacaggcgtcacaatcggaatgggatattttcattgaagaagatttccgcgcccgcattgataaaatcaaggactggttaggagatggcgtcattgccgacttcgacgacaaacaaatcgagcaagcgctggctgatgtcgacgtccccattgttggggttggtggctcgtatcaccttgccgaaagttacccacccgttcattacattgccaccgataactatgcgctggttgaaagcgcatttttgcatttaaaagagaaaggcgttaaccgctttgctttttatggtcttccggaatcaagcggtaaacgttgggccactgaacgcgaatatgcatttcgtcagcttgtcgccgaagaaaagtatcgcggagtggtttatcaggggttagaaaccgcgccagagaactggcaacacgcgcaaaatcggctggcagactggctacaaacgctgccaccgcaaaccgggattattgccgttactgacgcccgggcgcggcatattctgcaagtatgtgaacatctacacattcccgtaccggaaaaattatgcgtgattggcatcgataacgaagaactgacccgctatctgtcgcgtgtcgccctttcttcggtcgctcagggcgcacggcaaatgggctatcaggcggcaaaactgttgcatcgattattagataaagaagaaatgccgctacagcggattttggtcccaccagttcgcgtcattgaacggcgctcaacagattaccgctcgctgaccgatcccgccgttattcaggccatgcattacattcgtaatcacgcctgtaaagggattaaagtggatcaggtactggatgcggtgggcatatcacgctccaatcttgagaagcgttttaaagaagaggtgggcgaaaccattcacgccatgattcatgccgaaaagctggagaaagcgcgcagcctgctgatttctactaccttgtcaattaacgagatatcgcaaatgtgcggttatccatcgctgcaatatttctactctgtttttaaaaaagcatatgacacaacgccaaaagagtatcgcgatgtaaatagcgaggtcatgttgtagcgatgatgagaattatcggcgtcgcatcaggtaactcagcacaaccacctgatacgagcaaaagccttatccgcctgacaagtcggataaggctcgaggaaatgcaattacatatgcgccgcgattaaccgttggttatcctggtacattgcgaacaggtagttgttataactcttccctttggtcgagtagcccttcagcttgtgaatcatcgctgtggcagtcacttcctgatccgctttacgcagttgtgcacgcgatttacggaacgaagagtaagccgggtgcgtattgaggttagtgacataggcgctcaccgattctttgacagaactaaactgtgagtaccctttcactttacccggcgcattggtacaacgtcctttcatgcatttcatgccgaacaggttgttgttgttgcgcgccagctttgacgttccccaaccgctttctgctgcagccatcgtcgccaccatactggtagggataatgtctacgcgttcaagcaaggtattccacgggatttttcgcgtattaccagaccacttcaccttgtagcgtttggcgatgtctttcagacgcgcacgctcagcaggtgaccattggccctgatactgttttgaaatcagccagttacgttccgcagtaatggccgcattttggctggtaatgtaaggcattacagtccggagaaacgcctttttccttggtgttccggaagggtattttcgcaaatcaggaagtgaactactctttgcactattgcgagaatactcttgtttactgcttacctgtttattactagctttagttaagtgggacttttgactcgctgttgttgtgtgcgtcttcgctaacacctcactcgaaaacaccagagtgagtaacataagaatcatcgccccatatcgtcgtatgggagtcaaaatcatcaggtctcctggtcggatttaatcattccaacaccttatattttttacaaatttgagagttgaatctcaaatcatatcaaaaatagctgtcaagagcaccccaaggaatagtccaaatctgaaactatgtcacgagttaacgattcagattggcgctaaatcgcagaaaatgtggggtttatcgcaaaattcagccgttttttgcgcgcgatcgctcacccttgcttctcatcctgtggacttaccgctcagggatgagttttgtctggcttatcgctggcaaactgtctgaaatcgcagcaataaggactcatccgccatgaaactcgccgcctgttttctgacactccttcctggcttcgccgttgccgccagctggacttctccggggttccctgcctttagcgaacaggggacgggaacatttgtcagccacgcgcagttgcccaaaggtacgcgtccactaatgctaaattttgaccaacagtgctggcagcctgcggatgcgataaaactcaatcagatgctttccctgcaaccttgtagcaacacgccacctcaatggcgattgttcagggacggcgaatatacgctgcaactagacacccgctccggtacgccaacattgatgatttccctccagaacaccgtcgaaccggtagcaagcctggtccgtgaatgcccgaaatgggatggattaccgctcacactggatgtcagcgccacttttgcggagggagccgctgtccgggattattacagccagcaaattgcgatagtgaagaacggtcaaataacgttacaacccgctgccaccagcaacggtttactcctgctggaacgggcagaaactgacacatccgcccctttcgactggcataacgccacggtttactttgtgctgacagatcgtttcgaaaacggcgatcccagtaatgaccagagttacggacgtcataaagacggtatggcggaaattggcacttttcacggcggcgatttacgcggcctgaccaacaaactggattatctccagcagttgggcgttaatgctttatggataagcgccccatttgagcaaattcacggctgggtcggcggcggtacaaaaggtgatttcccgcattatgcctatcatggttattacacacaggactggacgaatcttgatgccaatatgggcagtgaagccgatctacggacgctggttgatagcgcgcatcagcgcggtattcgtattctctttgatgtcgtgatgaaccacaccggctatgccacgctggcggatatgcaggagtatcagtttggcgcgttatatctttctggtgacgagctgaaaaaaacgctgggtgaacgctggagcgactggaaacctgccgccgggcaaacctggcatagctttaacgattacattaatttcagcgacaaaacaggctgggataaatggtggggaaaaaactggatcagaacggatatcggcgattacgacaatcctggattcgacgatctcactatgtcgctggcctttttgccggatatcaaaaccgaatcaactagcgcttctggtctgccagtgttctataaaaacaaaacggatacccacgctaaagacatcgacggctttacccctcgcgattacttaacccactggttaagtcagtgggtccgcgactatgggattgatggttttcgggtcgataccgccaaacatgttgagttgcccgcctggcagcaactgaaaaccgaagccagcgctgcacttcgcgaatggaaaaaagctaaccccgacaaagcattagatgacaaacctttctggatgaccggtgaagcctggggccacggcgtgatgcaaagtgattactatcgccacgacttcgatgcgatgatcaatttcgattatcaggagcaggcggcgaaagcagtcgattgtctggcgcagatggatacgacctggcagcaaatggcggagaaattgcaggatttcaacgtgttgagctacctctcgtcgcatgatacccgcctgttccgtgaagggggcgacaaagcagcagagttattattattagcgccaggcgcggtacaaattttttatggcgatgaatcctcgcgtccgttcggtcctaccggttctgatccgctgcaaggtacgcgttcggatatgaactggcaggatgttagcggtaaatctgccgccagcgtcgcgcactggcaaaaaatcagccagttccgcgcccgccatcccgcaattggcgcgggcaaacaaacgacactttcgctgaagcagggctacggctttgttcgtgagcatggcgacgataaagtgctggtcatctgggcggggcaacagtgacttttccggcttcccgttcgtcagtacctcgggaagccgccaaccaggataaaatgtcagccctaatcagcattgcaggataaagcaccgctcactcttcaacagaccgatttgcaccccagcaaatgtagcgttattgttaccttccttgctacagagttcgacagatatcccgctatgacattctccctttttggtgacaaatttacccgccactccggcattacgctgctgatggaagatctgaacgacggtttacgcacgcctggcgcgattatgctcggcggcggtaatccggcgcagatcccggaaatgcaggactacttccagacgctactgaccgacatgctggaaagtggcaaagcgactgatgcactgtgcaattatgacggtccacaggggaaaacggagctactcacactgcttgccggaatgctgcgcgagaagttgggctgggatatcgaaccacagaatattgcactaacaaacggcagccagagcgcgtttttctacttatttaatctgtttgccggacgccgtgccgatggtcgggtcaaaaaagtgctgttcccgctggcaccggaatacattggctacgctgacgccggactggaagaagatctgtttgtctctgcgcgtccgaatattgaactgctgccggaaggccagtttaaataccacgtcgattttgagcatctacatattggcgaagaaaccgggatgatttgcgtctcccggccgacgaatccaacaggcaatgtgattactgacgaagagttgctgaagcttgacgcgctggcgaatcaacacggtattccgctggtgattgataacgcttatggcgtcccgttcccgggtatcatcttcagcgaagcgcgcccgctatggaatccgaatatcgtgctgtgcatgagtctttccaagctggggctacctggctcccgctgcggcattatcatcgccaatgaaaaaatcatcaccgccatcaccaatatgaacggcattatcagcctggcacctggcggtattggtccggcgatgatgtgtgaaatgattaagcgtaacgatctgctgcgcctgtctgaaacagtcatcaaaccgttttactaccagcgtgttcaggaaactatcgccatcattcgccgctatttaccggaagatcgctgcctgattcataaaccggaaggagccattttcctctggctatggtttaaggatttgcccattacgaccgagcagctctaccagcgcctgaaagcacgcggcgtgctgatggtgccggggcacaacttcttcccgggactggataaaccgtggccgcatacgcatcaatgtatgcgcatgaactacgtaccagagccggagaaaattgaggcgggtgtgaagattctggcggaagagatagaaagagcctgggctgaaagtcactaaaaattgcctgatgcgctacgcttatcaggcctacatgatttctgcaatatattgaatttggtagaatttgtaggccggataaggcgttttagccgcatccggcataaacaaagcgcactatccctgcgttgagaaacgccggaaaaacgtttcaaacaggctgctgccgtagccgatgtcgctgcactttctcgacatccatgcactgcaacgcctttgtcgggcaggcttcaacacaggccggccccgtcgcccgatgccagcacagatcgcacttaatcgccctcgcctttttgcgcgaagaaacgacctccatcgcaccaaacgggcaagccagcatacagcttttacagccaatgcaacgtgattgttcaacgaaaatatgcccatgttcgcggcttatcgcgtcaacagggcagacattcgcgcacggtgcatcttcacactgatgacaggctactgccgtggtccagctgtggtctttaataacacgaatacgggaaataaactcgtctggtgacaacgcagcgcaatcctgattctcctgatgcgacactgcgcaagccacttcacaggtacggcaaccgatacatttcgtcgcatccgcaataataaaccggttcatgatcactcctttgcactaaaacagcagagtgccagagagcgcgtccctactgctttgatccaacgaaggaaatgttaaagttttggcacttgtccaaagggttatgtaatcgcgccctggtcgtccctgacagtaaatcccagttcattagaaatagcctgcgcggtttcacgcagtggtttcaggagatttttctctcccacctgtttcagacgtgatgtcgaaagcgaaatcgacacggcgtacggcacccgcccatgaatatcaaacaccggaacagcaatacaggagacgccgagttcgttttcttctctgtccatcgccgctccactttcacgaatgtgcgccagttcgtcgaacatcgcgggcagctcggtaatggtattgcgggttaacggctggatctcatgctgatggctttcccagtatgacttcacgtagtccgggtgaccaaacgccatgtagatcttgcccattgcggaacagtagagcggcatatgctggcctatataggcacgggttcgcagcatcccggttgtgggttccaacttataaatcaaaatagcgtgatcgtcttcgcggctggagaagttaatagtttcaccagtggcgatgttcagagcctcaagatgcggagcggcgatatgaatgatattcagcgaagatagcgccttctgcccgacggcaataaatttggtggtcaggcgataactccctgcggcgggcgcggtggtcacatagccgcaggactgtaatccctgcaataagcgatggacggtactcttatttaaaccagccagctccgaaagatgcgccaacggacaaccgtttggatagttgctcaaaatctcaatcagcatcaacccacgaaacagactctggcttccggctgggcgctctttttcctgcgccatctcgttctctttttttcccatcacttctttccccattttgtcgcgtcctgatggtagcgcaaagtgtgccgtagttcacgatctcgacagataatttataaccacttgatttttaagttttttgaaattcatcaatcagattgctttgttaaaaagtgatcgatatatttgaaatcaagtttcgtatattgaaattttaagccaaaaaagcgatcaaaaaaacaaggaagcctgggatgaaagtgacatttgagcagttaaaagcagcctttaatcgggtcttaatttcacgcggcgttgacaacgaaacggctgacgcctgtgcagagatgttcgcccgcaccaccgaatccggcgtttattctcacggcgttaatcgtttccctcgtttcattcaacaactggaaaacggcgatatcattcctgatgcccaacccaaacgtataaccagcctcggcgcaattgaacagtgggacgcccagcgttcgatcggtaacctgacagcgaaaaagatgatggatcgcgccattgaactggctgccgatcacggtattggtctggtggcactacgtaatgccaaccactggatgcgcggcggcagctacggctggcaggcggcggaaaaaggctatattggcatttgctggaccaactccatcgccgtaatgccaccgtggggcgcaaaagagtgtcgcatcggcaccaacccgctgatcgtcgccattccttccacgccgatcaccatggtcgatatgtcgatgtcgatgttctcttacggcatgttagaagttaatcgcctggcaggtcgtcagctcccggtagatggtggctttgatgatgagggcaatttgaccaaagaacctggcgttattgagaaaaatcgccgcattttgccgatgggctactggaaaggttcgggcatgtcgattgtgctggatatgatcgctaccctcctttctgacggcgcatcggttgccgaagtcaccgaggacaacagcgacgaatacggcatttcacaaatttttattgccattgaagtggacaagcttatcgacggtcccacccgcgatgccaaactgcaacgcattatggattacgttaccagtgccgagcgtgctgacgaaaaccaggctattcgtttacccggccacgaatttactaccctgctggcagaaaaccgccgtaacggtattaccgttgatgacagcgtgtgggcaaaaatccaggcgttataaggagataagccatgatttttggacatatcgcgcagcctaatccgtgccgtttgcccgccgccattgaaaaggcgctcgattttctgcgcaccaccgacttcaacgccctggaaccgggcgttgtcgaaatcgacggcaagaatatttatgcgcaaattatcgatttaaccacacgcgaggcggtagaaaaccgtccggaagtgcatcgtcggtatatcgatattcagtttctggcgtggggtgaagagaaaatcggcattgccattgatacgggaaacaataaagtcagcgaatcactattagagcagcgcgatattattttttatcacgatagtgaacatgaatcatttatagaaatgataccgggtagttacgctattttcttcccgcaggatgtacatcgcccggcatgtaataaaaatgccactacggcaatacgcaagatcgtggttaaagtggccctcgctgctttataaaaaatgattactggagcacataatgaaaacgaataatgccggttatattatcggcgcgtatccctgtgcaccttcttttcaccaaagaagtgaagaggaagagaaggatttctggcgacaattatctgagactccagacattttggggctggaacaaccttgcctggaaaattttcacccgctgggcgatcaatggttactccgtcatacgccagagagctggaaatttgtcgtcaccgcagtgatggaaaccatgcgtcgccgcagcgaaaacagcgggtttggtctcgcctccagtgatgaagaacagcgccaggcctgcgtggcgtactatcgccacctgttcaataaaatcaactcattgcaggctaataaagtgctcgcactggagctccaggctgcaccgttagcaacgaatcctaatgttatgcaagcgacggacgcttttgcccgctcattgaaagaaatcgccagttgggactggccgtgcaagctggtgctggaacactgcgacgccatgacatcttcttccccccgaaaaggctttttgcctttagaaaatgtgctggaagttattaccgattatgacatcagcatctgtatcaactgggcgcgctctgccattgaagggcgcaatacaacgctgccgctgacccacacccaaatggcgaaacaagccggaaaactcggcgcgttaatgttctctggtacgacgctaaacggggcatacggcgaatggcaggatttacacgcaccgtttgcaccattctgcgcagaaagcctgatgaccacagatcatgttcgcgagttatttaatgtagcagaatcgtcaacattgcattttgctgggatcaagctactggaaataaatgcgacggctgatgtgcaccatcgcatcgaaatattacgcaacggcattcactctctgaatgaatctcgttaaacagaaccatttatatatcactttgaatatctaattagccgttttctgataattattacgaatattaacaacattagcgcataaaaaatattgcataaccagaaggactcgttatgaaacggatactcgaaggcattcttgcgatcatcatcgcaatactgtcttgtattatttttattaatatcattcttcgatatggattccacacaagtatattatcgattgatgaattatcccgacttttatttgtctggttaacctttattggcgcaatcgttgcttatatggacaacagccatgtgcaggttacttttttagtcgaaaaactctcaccggctaatcaacaacgtgtttcgctgctaacccatacgctcattttattgctgtgtctggggctggcctggggcgctatagaaaaaacagcgcaagactggagcaacttatcgcccattcttggcgtccccattggcttaatgtacgccgccgctatccccaccagtctgattatcgcattgctggaattgcgtcacttataccggcagttcacaaatacccccagccgaaaccaacaaggagcctgacgatgacaatccttatatttattgtcagtttgttaggggctatcgcaattggcgttcccatcgcctgggcattattactgtgcggcatttcattgatgttctggatggatatctttgatgtgcaaattctggcacaaacgttggtaaatggcgcagacagcttctccctgttagccatccccttctttgtactggcgggtgagatcatgaacgcgggcggcctgtcgcaacgtatcgtcgacttgccaatgaaactggtaggccacaggccaggcggtctgggttacgtgggcgtgctggcagcgatgatcatggcaagcctgtccggttctgcggttgctgataccgcagctgtcgcggcgctgctggtgccgatgatgcgccaggccaactatccggtaaaccgcgccgccgggcttatcggttccggggggattattgcggccattatcccgccttccataccactcattatcttcggcgtctccagcggactctccatcagcaaactgtttatggcgggcattgcgccaggcatcatgatgggcgtcacgctgatggttacctggtggtggcaggcaaaacgactgaatttaccttgtcagccgaaagcctcactgcgagaagtctggcaatccttagtttccggtatttgggcgctctttttaccgataattattattggcggtttccgttcggggttatttacaccgaccgaagcaggcgcggttgccgccttctacgctctgttcgtctcggtggtggtctatcgcgagatgaccttctccacgctttatcatgtgctgattaacgcggcaaaaaccacatccgtggtgatgttcctggtggcctctgctgcggtatctgcatggcttattacgatcgccgaattacccatgatggtatcggagctattacaaccgttggttgattcgcctcgcttattattcatcgtcattatgctcgctattatggtgatcagtacggtcatggacttaacgcctaccgtattaattcttacaccagtattaatgccattagtgaaagaagcgggaatagatccggtctatttcggcatcatgtttattatcaactgttcaatatcactgattacgcctccagtcggtaatgttcttaacgtggtatgcggcgtggcgaaacttaaatttgacgatgcggtaaaaggcgttgcgccttacgtcatggttttattcatgttgttagcattatttatttttataccggagctcattaccgctcctcttaaatggatgagttaaaaggaaatcataatgaaattacgttctgtaacctacgctttattaattgccggagtggcgacgttcagcacatcttctctggcggcacaatcattacgtttcggttatgaaacctcacaaaccgattcacaacatattgcggcgaaaaaatttaatgaattactgcaggaaaaaaccaaaggcgaactgaaattaaaactgttcccggatagcacccttggtaatgcgcaggcgatgatcagcggcgtgcgtggcggcactattgatatggagatgtctggctctaacaactttacgggactctcgcccgtcatcaacctgctcgatgtcccgttcctgttccgcgataccgctcacgcgcataaaacgctcgacggcaaagtcggtgatgacctgaaagtctcccttgaaggtaaggggctgaaagtactggcctactgggaaaacggctggcgcgatgtcaccaactcgcgtgcaccggtcaaaacgcctgccgacctgaaagggttgaaaatccgcaccaacaacagcccgatgaatatcgctgcatttaaagtttttggcgctaacccgatcccgatgccgtttgccgaagtctataccgggctggaaacccgcactatcgacgctcaggaacacccgatcaacgtcgtctggtcagcaaaattttatgaagtgcagaagtacctttctctgacccatcacgcctattcgccgcttctggtggtgatcaacaaagcgaagtttgatggcttaaccccggagttccagcaagcactgatctcatctgcgcaggaagcgggtagctatcagcgcaaactggtcgccgaagatcagcaaaaaatcatcgacggtatgaaagaagcgggcgtggaagtcatcaccgatctcgaccgcaaagcctttagcgatgcgctgggtacccaggtccgtgacatgtttgttaaagatgttccgcagggtgctgatctgctgaaagccgtggatgaggtgcaataaaccatgacgcaatactggctggggttagattgtggcggtagctggctgaaagccgggctgtatgaccgagaaggccgggaggcgggcgtgcagcgcctgccgctgtgcgcattaagtccacagccaggctgggcagagcgcgacatggcagaactgtggcaatgttgcactgctgtcattcgcgccctgcttacccattccggcgtcagcggggaacaaattgtcggtatcggcatctccgcgcagggaaagggcttatttctacttgataaaaacgacaaaccgctcggtaacgccattttgtcctcggatcgccgggcgatggaaatcgttcgtcgctggcaggaagatggcatcccggaaaaactctatccgctgacccgacaaaccttatggaccgggcatccggtgtcgctgttacgctggctgaaagagcacgaaccagaacgctacgcgcaaattggctgcgtgatgatgacgcacgactacctgcgctggtgtttaaccggcgtcaaaggttgtgaagagagcaatatttctgagtccaatctctacaacatgagtcgcggggaatatgacccgtgccttaccgactggctggggattgctgaaatcaatcacgccctgccgcctgttgtcggatctgccgaaatctgcggggaaatcaccgctcagacagccgtactgaccggtctgaaagcgggtacccccgttgtcggcggcctgtttgatgtggtttccaccgcactctgcgccgggctcgaagacgaattcaccctcaatgcggtgatggggacctgggcggtgaccagcggcataacccacggtttacgtgacggtgaagcgcatccgtatgtctatggtcgctacgttaacgatggtcaatttatcgttcacgaagccagccccacctcttccggcaatctcgaatggtttaccgcacagtggggagaaatctcatttgctgagattaatcaggccgtagccagtttgccgaaagccggtggcgatctctttttcctgccgttcctgtacggcagcaacgccggactcgaaatgaccagcggtttctacgggatgcaggccattcacacccgtgcacacctcttacaggctatctatgaaggggtggtgttcagccatatgacccatctcaaccggatgcgcgaacgttttactgatgtgcacaccctgcgcgtcactggcggcccggcgcactccgatgtctggatgcaaatgctggcggacgtcagcggtctgcgtatcgagctgtcgcaggtggaagaaaccggctgctttggtgcggcacttgccgcccgcgtcggtaccggggtttatcgcgatttcagcgaagcccaacgtgacttacagcacccggtacgcaccctgctgccggatatggccgcgcatcagctttaccaacaaaaataccaacgctatcaacatctcattgccgcacttcagggttatcacgcccacatcaaggagcacacattatgagtcgaccacttctgcaactggccctcgaccactcatcacttgaagccgcgcagcgcgacgtgacgcggttaaaagacagcgtcgatattgtcgaagcaggcaccattctctgtttaaacgaagggcttggcgcagtgaaagccttgcgcgaacagtgccctgacaaaatcatcgttgccgactggaaggtcgccgacgcgggtgaaacgctcgcgcaacaggcatttggcgcaggcgctaactggatgaccatcatctgcgccgcgccgctcgccacggtggaaaaaggccacgcgatggcgcaacgctgcggcggtgaaatccagatcgagctgttcggcaactggacgctggacgatgcccgtgactggcatcgtattggcgtgcggcaggccatttatcatcgtggtcgtgacgcgcaggccagcgggcaacagtggggcgaggccgatctggcacgcatgaaagcgctttccgatatcggccttgagctttccattaccggcgggattacccctgctgacctgccgctgtttaaagagatccgcgtgaaagcgtttattgccggacgggcgctggcaggcgcagcaaatccggcgcaagtggctggcgatttccatgcgcaaatcgactccatctggggaggcaagcgtgcgtaatcatccgttaggcatttatgaaaaagcgctggcgaaagatctctcctggccggagcggctggtgctggcaaaaagctgtggttttgattttgtcgaaatgtcggtggatgaaaccgacgaacggttgtcacgtcttgactggagcgccgcacaacgtacttcgctggttaccgcgatgatcgaaacgggtgttgctattccgtcaatgtgcctgtccgcacatcgtcgttttccttttggtagccgggacgacgccgtgcgccagcgggcgcgggagattatgagtaaagcgattcgcctggcgcgcgatctcggcattcgtactattcaactggcaggttacgacgtctattacgaagaccacgacgaaggcacccagcaacgttttgctgaagggctggcgtgggcggtcgaacaggcggcggcatcacaagtcatgctggcagtggagattatggatactgcgtttatgaactccatcagcaaatggaaaaaatgggacgagatgctcgcctcgccgtggttcaccgtctacccggacgtcggcaacctcagcgcctggggcaatgatgttcccgccgaactgaaactgggcatcgaccgtatcgccgccatccacctgaaagacactcaacccgttaccgaacatagccccggacagttccgcgatgtgccgtttggcgaaggctgtgtcgattttgttggcatcttcaaaacgctgcatgagctgaactatcgcggatcatttctgattgaaatgtggaccgaaaaagccaaagagccggtgctggagattattcaggcgcggcgctggattgaagcgcgtatgcaggaggccggatttatatgttagagcaactgaaagctgacgtgctggcggcaaacctggcgcttcccgttcatcatctggtgacgttcacctggggcaatgtcagcgcgatagacgaaacgcggcaatggatggtgattaagccttccggcgttgagtatgaggtaatgaccgccgacgatatggtggtggttgagatagccagcggcaaggtggtggaaggcagcaaaaagccctcttccgacacgccaacgcatctggcgctttaccgtcgctttgcggagattggcggcatagtgcatacccactcgcgccacgccaccatctggtcgcaggccggacttgatctccccgcctggggcactactcacgccgattatttttacggagccatcccctgcacgcgcctgatgaccgcagaagagatcaacggcgagtatgaataccagaccggcgaagtgatcattaaaaccttcgaagagcgtgggttgaacccggcacaaatcccggcggtactggtgcattctcacggcccgttcgcctggggaaaaaatgccgccgatgcggtgcataacgccgtggtactggaagagtgcgcctatatgggtctgttctcgcgccagcttgcgccacagctccctgcgatgcaaaacgaactgctggataagcactacctgcgtaagcatggggccaatgcctattacgggcagtagccatacctgatagtgcccggcaatacacgccgggcagcctttcacatcagaacagccccaacggtttatccgagtagctcaccagcaggcacttggtttgctggtaatgctcaagcatcattttgtgggtttcgcggccaatgcctgattgtttgtagccgccaaacgccgcatgtgccgggtaagcgtgataacagttggtccacacgcgcccagcctgaatgccgcgccccatcttataggccagattaccgttgcggctccagacgcccgcgcccaggccatattgcgtatcgttcgccagctccagcgcttcttctatcgttttgaaggtggttaccgccagcaccgggccaaaaatctcctcctggaacacgcgcatattgttctgaccaaacaaaatcgtcggttcgaggtagtagccgtctttcagttcgccttccagcagcttgcgccgcccgccggtgagcacatcagcgccctcttttttaccgatatcaatgtagttgaggatggtttccagttgcccgtgagaaacctgcgcgcccatttgcgtcacgctgtcgagcgggttaccgctgcgaatgctttcgacacggcggatggcgcgttccataaagcgttcgtagatagactcctgcactaaagcacggcttggacaggtgcaaacttcgccctggttaaaggcaaacagtgcaaagccttccagcgctttatcgaaaaaggcatcttcttcatccatcacatcagcaaagaagatatttggcgatttgccgcccagctccagcgtcaccggaataatgttttgcgtggcgtattgcataatttgttgacccacttccgttgagccggtaaacgccactttggcgatgcgtttcgaggtcgccagatattcgccaatttccccacctgcgccgttgaccacgttcaccacccctggcggcagtaaatcaccgacgatttccattagcagcagtacagaaagcggagtaagacgtgcgggtttcagcaccacacagttgccagccgccagcgcgggagccattttccagctcgccatcagcagcgggaagttccacgggataatctgccccaccacgcctaacggctcatggaaatgataggccacggtttcgctatcaatttcactgatcccaccttcctgcgcccgaatacacgaggcaaaatagcgaaaatgatcaatcgccagcggcacgtcggcagcactggtttcgcgaatgggtttaccgttatcccaggtttctgccgtcgctaaaagttcaaggttttgttccattcgatcggcaatcttaaacagaatcgccgcgcgatcctgcaccgaggtgtgcgcccatttatctttcactttgtgcgcagcatccagcgccagatcgatgtctcgtttgcccgaagacgccacttcgcacagtagctgcccggtcaccggcgtcaggttctggtaatactcgccgtcggcaggggctacccattcgccgccaataaagttgtcgtagcgggcttttaatttgagggggaaaccatactcgccgggcttaatctgtgctgaagggggattattggtcatgatcgtctccttgcggtgtgaggtataacaagggtagacgtgactggcgaaatcttcgccagtcggtaacagctttacgacggctatcacgaatttacgggcaaaagctacagcgggtagtgtgcgacgtacactgcttgctggttattaattcttttctcttgcgcgaatccttctttaacaattgtccgtaaatcggtccgcgccgtattatccgagacgctcagactcacactaatttcagcaactgtgtactctttccccggattggcgagcatcacattcaggagcgttacctggcgcggattcaggcgtttaagcacaccagagctaaacagcacactatcgagttttgcgcttcgttgtgtaatttcatcgatatgctgctgccagttttgcagagcacgtttaatgacacccgcctgatattcaaggaaataagtcagatccataccatctgattcagtgtactggtagctggcggcatatttgaccggtgcagcatgaagcaaactgctgatggaaatatatttaaagacatcgtagcccgatttcagcatataccagtaaaacagcgcccgactggtgcgcccgttgccatcccgaaacggatgttcatgggccagcataaaatgcagaatgcaggcacggaccaacggatgaatatacccttcatggctgtttaaccactggcaaactttttccagccgttccggtaacaatgccgcagcgggcggttgatgcactatattgccatcatagtcggcgatcacaacatcatctgtttcacgaaattctcccggacgatatttcgcgtcattgattccacccataccaatggcatgtaactggcgaataagcgcaggtgtcagcggttctgcgagtaagtgcggaatttccgccatcagccgggcatttcccgcaatcatatgctcgtcttcagtgcgtggcgaccgccctgtttccagcatttttctcgccaccagcgttgtagtattcgcaccttccagctgggagctggtgatcggctcttccaggcgtaactggcttaactcggctccggccccgcgtaaccgttcagtctgatctttcagcgccagcgcggtagcacgtttgtcgacaagctcgcacgcttctgcaatcaccggggtaatgttgaatccggcctgttcacccgcttcattgcaataattaattcgttggatcgccgcgttgcgcgccagacgggtaagcgtccacgccacatcgacgttttctccttttttgatgcggtactgcaactcatcaaaaggcagataacgtcctttttcatcggtaacccggttaaagcgcaggtgggccaggagttcctcacccgataagtgtgataaaggaataagtccgggaggtgatttgatagccatgtgcttatctcaaaaaagcgcaatattgagatagtgtatagcaggaaagagaaactatctcaaaaaaagcaagttttgagatagttgaaaaagcggctgacaactcgccagccgttgtgggaatgatgattacatcgctgcgcgataaatcgccataatttcttcgtgagttgcctgaatcgggttagtaaacccacacgcatctttcagggcattggttgccagcactggaatatcttcttctttcacgttcaggtcacgcaggcctgccgggatattcactttcttcgccagttcacggatggcattgatgcacgcttctgcgccttccgcgtcatttttgcctgtcacgttaacgcccatggcagcagcacagtcacgcagacgcgcagcagcgactttgctgttgaacacctgaacgtgtggcagcagaacggcattacatacaccatgtggcaggttgtagaaaccgcccagctggtgcgccatcgcatgaacataacccagagaagcattattgaacgccataccggcgaggaactgggcataagccattgcttcacgcgctttagcattgctgccatcttcaacggctaacggcaggttttcggcaatcatggtcacggctttcagtgcacaagcgtcagtgatcggcgtggcggcaatagaaacatacgcttcgatagcgtgcgttaaggcatccatacccgttgcagcggtcagtgacttcggcataccgatcatcagagaggagtcattgacagaaagcagcggagttacatgtttatccacaatcgccattttgatgtgacgcgcttcgtcagtgatgatgcagaaacgggtcatttcagaggccgtacccgccgtggtgttgatggcgatcatcggcagctgcggttttgcagagcggtcaacgccttcataatcgcggatgtcaccgccgttggctgcaaccagcgcaataccttttgcgcagtcgtgtggagaaccaccgcctaaggaaatcacgctatcgcaattattttctttaagtaatttcaaacctgcggcgacgttttccgtggtggggttaggttgggtgccatcataaataacgctaaaaatattgcgttcttccagtgctttttgcacatcacccgccatacccaatttcgttaatatgttgtcggtgacaattaaggtacgggtaaatccataatctgccatcatattcattgcatcattcaatgaatcagcaccaataacattcacggaaggaataaaaaaggttgaagctgccataacacactcctgaaagtgtaaaaaagggcgggcagcttactgaggattttcatttgaaaatatgatcaacattaccgtttattaaaatatttttaataaaaagcacgttacattcatcaaataacgtgccttcttaacattaataagaaattttgtattaattcatatttattatgaattaatcatttccttatttttccggaaataataatgcgtcgcgcaataaatgatcatttccccgacgacgcgtaaagccaatacggtcaaaatattccagaatctgaattgccagcttgcggcctacgcctaagcgatcgcggaaatccgccgcgcaggttgaaccgcattcctgatcgagatcgcggatcatattggcaaattcgacaatccgatcgttacggtaataacgatctttgacgatcgcagtaattatcccctgttgggccgcctggcgtagcgtcaggcgcattgcctgctcgtcggttcccgtctcttttgccaggtcacgcacccaccatggctcgtcaccaaacagcggctctgctttttgccagatggcctgctgctctgcactgaagcccgctttatgatccggcagatgcagccagccgtgatgactgtggatgtcgccgctttcgcgcatcttttcaatcagcaacagtaccagcgcttcatcttccattggcaacgccatacgtcgcagacgttcgcgcccaggaccaggttcatcgcgatgttgctcatgataagtcgctaatgtatcgagaattttccgctgccagcgggcggcaactggcgcattcaacaagctgtaaccagcctgaatatagccaggctgttgcagcagttcgcgcatcccttcgccgttgagctgccgtgcccaggcgaaatccgcaaggttaaccgcgccgcgttccagatgaacagataacgcatcggcatcgctctgcgcccgtgcaagagacgccagccattgcagatattccggcttacgcttaccgcgacgcggcgggttaagcatcaccacacgcgcccccgccagcgtgttgcgggccgagatatcgcgcagcactatgcgatcgttatccgccagccacagcggcgtgtcgaacaccagctcggcaaggttatcttccagtagcgaaacacgtcccgtaacgtggctggcggcgtggtgaatatgcagcggctgccactgggtcagcggtgtatgggtttgaagctcgacaatcacccgtgtgaacggctccggcggcacatcggcaagcagccagtcgccacggttaatctgctctttttccgcatcacccgcgatgttaagcgcgatacgctgcccggcatgggcagtttctgttggctgattttgcgcatgcagcgcacgcacgcgcatcggtttatttacaccagtcagccagagtgaatcgcctactttcacttccccgcttaacgccgtaccggtgacgaccagcccggcaccttttacggtaaatgcgcggtcgatcgcgaggcggaaactatgttggctggcgtgttcacgttctggtaactgaagcagatgctcgcgcagagcatcaattccccgaccttcggttgctgcggtgataaacagttttgcctcagcaaaaccgtattcccgcagcacctcctttacctggcgttcaacctcatcaacacgcgcttcgtccacgcgatcggctttggtcagcgccactgtcagcatcgggttaccggtcagctgcaaaatcgccagatgctcacgggtctgtgccatcacaccgtcatcgcacgccaccaccaacagcgcgtgatcgataccaccaacgcccgccagcatgttggaaagaaacttttcatgaccgggtacgtcgataaaaccaggcacgcgaccatccggctgcggccagtaggcatagccgagatcgatggtcatgccgcgctttttttcttccggcagacggtcggcatttacgcccgtaatcgcctgcaacaaggttgttttgccgtggtcaacgtgtccggcagtcgcaataatcatttcaacaacatctccaaaaaccgttgctcatcttcaaggcagcgtaaatccagccacaatcgtccgtcataaatacgaccaatcaccggcactggcaattcacgccagcgggcggctaatgactcaaggtggctaccgcgtccatcatggggggtaaacgttaatgccgcgctcggcaggcgatcaaccggcagcgaaccactgccgatctgcgaaagacatggcataacctgtaccgcaaactccgcgccgtaatgtgcggcaaggggagcctgtaaacgttgtgcctggatttgaatgacctctgcgctgcgggtaagcaggcgcagggtcggtaatttttcactcagagcttcagggtgtaaataaagacgcaacgtggcttccagcgccgcgagggtcattttatccgcgcgtaatgcacgcttcagcgggtggctttgcaggcgggcgatcatctcttttttaccaacaataattcctgcctgcggcccgcctaacagcttgtcgccggagaagctcaccagactgacgcccgccgcaatcaactcctgcggcattggctctttcggcaaaccgtactggctaagatcgaccagcgagccactgcctaaatcagtcaccactggaacatccagttctttgccgagcgccaccagttccgcttcatctatcgctttggtgaacccctgaatgctgtagttactggtatgtactttcatcaacagtgcggtattttcattcaccgcctgacgataatcattcgcgtgcgtgcggttggtggtccctacttcgtgtagggtgcatcctgcctgacgcataacatcgggaatacgaaacgcgccgccaatctccaccagttcgccgcgagaaaccaccacctctttcccgctggcagtggccgccaacatcaataacaccgccgccgcattgttattaacgatacaggcatcttccgcccccgtaatacggcacagcagctgcgccagcgcccgatcgcgatgtccgcgtccggcgtcgtccagatcgtactcgagggtcactggcgaacgcatagccttcgtaacggcttccaccgcggcttccgcctgtaaagctcgcccaaggttggtatgcagcacggttcccgtcaggttgattaccggacacagcgcgctttgcgcctctttcgtcaaccgggcatcgacttcttgcgcccagttttcacaccacgcgggcagcgtctggctgtctcgaatcacttctcgcgcttcgtcaagcatctgacgcagcaattccaccacgcgggtgtgaccataagtatcacgcaaagaaaggaaggagctatcgcgcaataagcgatcaatagccggaagttgactatagagggaacgcgtttcggttgtcataggaaacctggctgatcaaggccctctcacacggagaagggcgtttaacataaccacggattgtaacgtgagatgggtcaggaggacatatcgcgcatcaagcctttggcggttcggtgcgagcaaaactttcgcggctaaacaggttttcgaccagtttgactaagtgtgggcggtcgacacaccagcctggcgcaacgcggcggaaattgagatatccgacggcacaggcaatggcgatagtcgccagattgaccgtatcggttttgagcgtgccatcgaccagatatccttccagcacatccagactgcggttgattttctcacgctgacgtaacaattcatcttcagactgctgcgccgccggacgcgcctgttcacgcaccgataccagcccggcatccataatgccatccgccagtgcctcaattttgcgcacccgcaacgactccagcggatcgcgcggcaacatcgccggagcaacattcattaattcaatatattcagcgatgatcggcgaatcaaaccagcattcgccctcttcggtcaccagcaccggcacttttcctaacgggttaaattgcgccacgccgttatccgcgttatagggcagttcattaataaattcgaacgttatgcccttttctaacaacagaatagaaagtttgcgtacaaacgggctggtgtagctaccgacgagtttcatgccgagtcctttgtgcgaggaaaaatatcagtatggctcaggctcgcgcaaaacacaggtgatacaagtctcaatgatccaaataaagataatgcatccaactggtcattcttagcagcactttccgcatcaccgaaacatggctgaaatggtcggagtaaactgccacctgggcgtatatgccgtcgggtaaggcatcgatatcagcgttagggtccagttcaatggttcccagcacaccgtccgtgccgggcacgaccgttaatgattgcaataccccctgcgcctgataagaaccgcctggcacgacaggtaaaatactggtcagtttgccgtgaaacacctgcccaggtagcgcgttaaacaccacttccgcatcatcgccgggtttcagacgtaacagcgagttttgccgaaattgggcgacaatttgccgtttttgctcggggatgaagaccatcaccggacgcagcggcaaggcagctgcgtatgtacctgggcggatcagtacctgagtgacgtagccattgctcggtgcgcgaatgacagtctgctcaaggttatattttgcttcagtaagttgcgctcttaagctcacaatctgcgattgctcgccgttaaccatactgtcgagctggctctggatctgcgcctgctccgccaccgagcctttcaccagcgcatcctgcgcgaggaaattttgccgcgcatcgtcgatgtcacgttccgagaacggattcaccgccgcctggctgcctttcaggtaacgttgataatttttaaacagacggtcgcgctccgctgaaacctgggtggtgttggcctgcgcttcagtgagctgcgcgcgcagcgtctttatattatgcgtcgccgtcatcaggtctgcctgaagcctgtcaactcgcgcctggtaacgaaccgggtcgagcttaaaaagcacctcgcccttctgaataagctgattatttttgtcggtgacttcagtaacaattcccgtcacctgtggcgtgatggggatcgctatcactgccttttgcgcggtaaaagtgtaagggtggttgtagttcatcaacaaaatcaaaccactcaccagaaacacgcctcccagcgccgccgtcgccagcgtccactgattcaccggaatgcggaagattttaaagaccgcccacgccagcgccacgtaagttaaaacaatcaatagatccataattagatctccggaaacgtggaatagtcagtctttttctcggcggcgagttggtgctccagccgggaaatccggtcagaaagtgcggcgatttccgcgtcagtcgttttctcttgcggcgtaacatgcgactgcatgccccagccgcgctccggttgatagagcgtcgcccagatccacaggaacggccagataacatgcagagtaaacaggctcacccagcccgccgtatgaatagcgtcggcatggggatggttgcgctttttggcaatcagataagggatgtcatgtatcgcgatgattccataaaaaatcaccagaaagacgaagatcagcactcccaacgcgaaatagtttagaaacatatctgcctcggattcacgtttatcagtgttgttttttggctggcagccagaagggagtcaggctgatattttgacaataatccgggttcgcgattctcgccataacaccaaagaataattttaagaggtgatgagttgcttagttacataacgatttcatgacgaaggcataacatgctgtagatcacatcaggtgaacgccgtaagaaaatatcttgtgattcagatcacaaagattcaacaaaccatcaaaataaaaatgtgacataactcacatttaaatgccatttttagcgaaaatcgccgccttgttgcttttttacacaagcattttgtgatgagcatcacgtcaattacctctctaccccctacatttatgtgactgatatcacacaaaaggccgccgactggacagttaaccgattcagtgccagatttcgcagtatctacaaggtccggctacctctgccgccacattaacaaaaaacctcgggcttccagcctgcgcgacagcaaacataagaaggggtgtttttatgtcatccgatattaagatcaaagtgcaaagctttggtcgtttcctcagcaacatggtgatgccaaatatcggcgcgtttatcgcgtggggtatcatcaccgcgttatttattccaacagggtggttaccgaacgaaacgctggcgaagctggtcgggccgatgatcacttatctcctgccgctgctgatcggttataccggtggtaagctggtaggcggcgaacgtggcggcgtagtcggtgccatcaccaccatgggcgttatcgtcggcgcagacatgccgatgttcctcggttctatgattgcaggtccgctgggcggctggtgcattaagcacttcgaccgctgggtagacggtaagatcaaatccggttttgaaatgctggtgaataacttctccgcaggcatcatcgggatgatcctcgctattctggcatttctcggcattggcccggttgttgaagccctgtctaaaatgctggcggcgggcgttaacttcatggttgtccatgacatgctgccgctggcgtctatctttgttgaaccggcgaagatcctgttcctcaacaacgctattaaccacggtatcttctcgccgctgggtattcagcagtcccatgaactgggtaaatccatcttcttcctgattgaagctaacccaggtccaggtatgggcgtgctgctggcgtacatgttctttggtcgtggtagcgctaaacagtctgcgggcggtgcggcaatcatccacttcctggggggtatccacgaaatctacttcccgtatgtgctgatgaatccgcgtctgattctggccgttatcctcggcggtatgactggcgtgttcacgctgactatcctgggcggtggtctggtttctccggcatctccgggttctatccttgctgtactggcgatgacgccaaaaggtgcttacttcgctaacatcgcgggtgtgtgtgcggcgatggcagtctccttcgttgtctctgccattctgctgaaaaccagcaaagtgaaagaagaagatgatattgaagctgctgcacgtcgcgttcaggaaatgaaagctgagtctaaaggcgcatctccgctgtctgcgggcgatgtgactaacgacctgagccacgtacgtaaaatcatcgttgcctgtgatgccggtatgggttccagtgcgatgggtgcaggcgtgctgcgtaagaaaattcaggatgcaggtctgtcgcagatttcggtcactaacagcgcgatcaacaacctgccgccagatgtggacctggtcatcactcaccgtgacctgaccgaacgcgctatgcgccaggttccgcaggcacagcatatttcgctgaccaacttcctcgacagcggcctgtacaccagcctgaccgaacgtctggttgctgcccagcgccatactgaaaacgaagtgaaagtgaaagacagtctgaaagacagctttgacgattccagtgctaatctgttcaaactgggcgcggagaacatcttcctcggtcgcaaagcggccaccaaagaagaagcgattcgttttgctggcgagcagctggtgaaaggcggttacgttgagccggaatacgttcaggcgatgttggatcgtgaaaaactgaccccgacttatctgggtgagtctattgcggtgccacacggtacggttgaagcgaaagatcgcgtactgaaaacgggcgtcgtgttctgccagtacccggaaggcgtgcgcttcggtgaagaagaagatgacattgcccgtctggtgattggtattgctgcccgtaacaacgagcacattcaggttatcaccagcctgaccaatgcactggatgatgagtccgtcatcgagcgtctggcacacaccaccagcgtggatgaagtgctggaactgctggcaggtcgtaagtaatccattcccaccctctccgcatgaagaaggtggggctaattgcctgatgcgcttcgcttatcaggcctacaacataaagcacaatttgttttgtcggtcggataaggtgtttacgccgcatccggcagtcggtgcacaatgcctgatgcgacgctgacgcgtcttatcaggcctacaggtcggtgccaaacacgtaggccggataaggcgtttacgccgcatccggcagtcggtacacaatgcctgatgcgacgctgacgcgtcttatcaggcctacaggtcggtgccaaacacgtaggccggataaggcgtttacgccgcatccggcaaaaagcccctctcctcacggagagggtttgggtgagggaaaagcctcaccccagccctctcgggtaaaaacattgatgaaggttaatactatgaaagcattacattttggcgcaggtaatatcggtcgtggctttatcggtaaactgctggcggacgcgggtatccaactgacgtttgccgatgtaaatcaggtggtacttgatgccctgaatgcccgtcatagctatcaggttcatgtggttggtgaaaccgagcaggtagataccgtttccggcgtcaatgccgtcagcagcattggcgatgatgtcgttgatctgattgctcaggtcgatttagtcactaccgccgttggccctgtcgtgctggaacgtattgctccggccatcgccaaagggctggtgaaacgtaaagaacaaggtaatgaatctccgctgaacatcatcgcctgtgaaaacatggtccgcggcaccacgcagctgaaaggccatgtgatgaacgccctgccggaagatgccaaagcgtgggtagaagaacacgttggctttgttgattccgccgttgaccgcatcgtaccgccttcggcttcggcaactaacgatccgctggaagtgacggtagaaacattcagcgaatggattgttgataaaacccagttcaaaggcgcgctgccgaacatcccaggcatggaattaaccgacaatctgatggcatttgtcgaacgtaaactcttcaccctgaatacaggtcatgctataaccgcgtacctcggaaaactggccggtcatcagaccattcgtgacgcaattctcgacgagaaaatccgcgcggtggtaaaaggggcaatggaagaaagcggcgcggtactgatcaagcgctacggctttgatgctgacaaacatgcggcatacatccagaaaatcctcggtcgtttcgagaacccgtacctgaaagatgatgtagaacgcgtaggccgtcagccgctgcgtaaactgagtgctggcgaccgtctgatcaagccactgctcggaaccctggaatatggtctgccacataaaaacctgattgaaggtattgccgctgcaatgcacttccgcagtgaagatgacccgcaggctcaggaactggcagcgctgattgccgacaaaggcccacaagccgcgctggcacagatttccggtcttgatgccaacagcgaggttgtatccgaggcggtaaccgcttataaagcaatgcaataatggtggaccaggcgcaggataccctgcgcccgaataacagattgtcagatatgcaggcaacaatggaacaaacccaggcctttgaaaaccgtgtgcttgagcgtctgaatgctggcaaaaccgtgcgaagctttctgatcaccgccgtcgagcttttgaccgaggcggtaaatcttctggtgcttcaggtattccgcaaagacgattacgcggtgaagtatgctgtagaaccgttactcgacggcgatggtccgctgggcgatctttctgtgcgtttaaaactcatttacgggttgggcgtcattaaccgccaggaatacgaagatgcggaactgctgatggcattgcgtgaagagctaaatcacgacggcaacgagtacgcttttaccgacgacgaaatacttggaccctttggtgaactgcattgcgtggcggcgttaccaccgccgccacagtttgaacctgcagactccagtttgtatgcaatgcaaattcagcgttaccaacaggctgtgcgatcaacaatggtcctttcactgacagagctgatttccaaaatcagcttaaaaaaagcctttcaaaagtaagtactttcgcttacttctcctctacctgtttcggacgataaagctgacgataatactccagacgttgtagatataacggcacgctttcatcaggtattccggacggaatcgcgttacggggaggtagttttttcagatactcccggaacgcctggctggatgccatgaaatctacggctttatcgataagaagcggaacgttttcacctaatttgcccatgatgatatctccgtattaccccgcgccgggaatgcgcggccgccaattttagtttagatcccggtataaatgacattaaggaaaacgtgctcaatcctcaataatcacctgcttctgttgactatcttttttctttaaatttcttaactaatcaatgtattgggtgattttttaacgcataaatggttacaatctggaactattacaatgccatcagttgtgaacaaagcacctggtcgcgcatactagaggctataaatttatctctatcagaagtcatcacatgaaagaagtcgaaaaaaacgaaatcaaacgtctcagcgatcgtctggacgccatccgtcaccagcaggccgatctgtcgctggttgaagccgcagacaaatatgccgaactggaaaaagagaaagccactctggaagcagaaattgctcgcctgcgcgaagttcacagccagaaactcagcaaagaagcgcagaaactgatgaagatgccgttccagcgtgcaatcaccaaaaaagagcaggctgatatgggcaagctgaaaaaaagtgttcgcggactggtggttgtgcacccaatgaccgcgctgggccgcgaaatgggcctgcaagagatgacagggttctcaaagactgcgttttaagttcctttctcgtcgctgtaatcacagcctctcaccatttactcgctcctgctggcacatgcaggagcctgtttcagagatcgaatctttataacgttcttaacattatatattcaactccacctacacttctgagcgatcgtagcaggctaaattctgaaaatcaggtacacattaaagaatgatgtatcaatatcaacaatgaatttccgcatatcaatgctcgaaacataattaattatttaaatttttcaatcagcttcgcaaattccacaataaaacatcactcaactgaatatttacctttccctgccctgtgcctttatccggtgaaacatttgacatcgattgacaccgatcattaaaatccgcgcgattaatattattggctacaaactgaaatcgtttgacatttaataacatattcgcacaaccaattaatacaaaaactctctaacaaatttattttgcggatatgccccattccaatcattcataaaaaaaatgattgtgccgtaattatcaactgtatcgggattatgaaaaggaattcatcctatgaacctaaagaaaacactgttaagcgtgttaatgatattgcaactttgcttattggtagggtgtgactatattgaaaaagcgagtaaggtcgacgatctcgttacacagcaagagttgcaaaaaagcaaaattgaggcgcttgaaaaacaacaagaactcgacaagcgcaagatagaacactttgaaaaacaacaaactaccatcataaacagtaccaaaacgctcgctggtgtggtgaaggcagttaaaaacaaacaggacgaatttgtctttacagaatttaacccggcacaaacccaatactttattttaaataacggctctgttggtttggcagggaaaatactgtctattgacgcagtagaaaacggcagtgttattcgtatttcactggttaacttattaagtgttcctgtatcaaatatgggtttctacgcaacatgggggggagaaaaacccaccgacatcaacgcattagcaaaatggcagcaattgctatttagtaccgcaatgaactcctccctgaaattattaccaggtcaatggcaagacattaatttgacgctaaaaggtgtctcgcccaacaacctcaaatatctgaaattagccatcaacatggcaaatattcagttcgaccgtcttcaacctgctgaatctccacagcggaaaaacaaaaaataaatgcagcttctgcgcttatatcaaggaatagagagcatcaataatgaacaaaatatttaaagttatctggaatccggcaacaggcagttacaccgttgccagcgaaacggcgaagagccgtggtaaaaaaagcgggcgcagtaagctgttaatttctgcactggttgcgggtgggttgttgtcgtcgtttggggcaagtgcagataattacactgggcagccaactgattatggcgatggctcagcaggtgacggctgggttgctatcggtaaaggggcaaaagcaaatacctttatgaacactagtggcgcgagtacagctttaggatatgacgcgatagccgaaggtgagtacagttctgccatcgggtcaaaaacccttgcaactggtggagcatccatggcgttcggggttagtgcaaaagcaatgggtgacagaagtgtcgcgctaggtgcatcgtcagtagcaaatggcgatcgttcgatggcttttggtcgttacgcaaagacgaatggttttacatctcttgctattggggactcctcccttgccgatggtgaaaaaactattgcgttaggaaatacggctaaagcttacgaaattatgagcatcgccctcggtgataatgccaatgcgtcaaaagagtatgcaatggcgctgggagcaagtagcaaagctggcggtgctgatagcctcgcattcggcagaaaatctacagctaatagcactggctcactggcaataggtgctgacagtagcagttcgaacgataacgccatcgcgatagggaacaaaacgcaagccctgggagtgaattcgatggccctgggtaatgcaagtcaggcatctggcgaatccagtattgcattaggtaacaccagtgaagccagcgaacaaaatgcgattgcgctggggcaaggtagcattgcaagcaaagtgaactcaatcgcgttgggaagtaacagtttgtcctcgggagagaatgccatcgcattgggagagggtagtgccgctggtggcagcaacagccttgctttcggtagccagtccagggcaaacggcaatgattctgtcgccatcggtgtaggggctgcagcagcgaccgacaattctgtcgctatcggcgcaggatcgaccacagatgcaagcaatacggtttcagttggcaacagcgcaacaaaacgcaaaattgttaatatggctgctggtgccataagcaacaccagtaccgatgccatcaacggctcacagctttatacgatcagtgattcagtcgccaagcgactcggaggaggcgctactgtaggcagcgatggcaccgtaaccgcagtaagctacgcgttgagaagcggaacctataataacgtgggtgatgctctgtcaggaatcgacaataataccctacaatggaataaaaccgcgggggcgttcagcgccaatcacggtgcaaatgccaccaacaaaatcactaatgttgctaaaggtacggtttctgcaaccagcaccgatgtagtaaacggctctcaattgtacgacctgcagcaggatgctctgttgtggaacggcacagcattcagtgccgcacacggcaccgaagccaccagcaaaatcactaacgtcaccgctggcaacctgactgccggcagcactgacgccgttaacggctctcagctcaaaaccaccaacgacaacgtgacgaccaacaccaccaacatcgccactaacaccaccaatatcaccaacctgactgacgctgttaacggtctcggtgacgactccctgctgtggaacaaagcagctggcgcattcagcgccgcgcacggcaccgaagccaccagcaaaatcaccaacgtcaccgctggcaacctgactgccggtagcactgacgccgttaacggctcccagctcaaaaccaccaacgacaacgtgacgaccaacaccaccaacatcgccactaacaccaccaatatcaccaacctgactgacgctgttaacggtctcggtgacgactccctgctgtggaacaaaacagctggcgcattcagcgccgcgcacggcactgacgccaccagcaagatcaccaacgtcaccgctggcaacctgactgccggcagcactgacgccgttaacggctcccagctcaaaaccaccaacgacaacgtgacgaccaacaccaccaacatcgccactaacaccaccaatatcaccaacctgactgacgctgttaacggtctcggtgacgactccctgctgtggaacaaaacagctggcgcattcagcgccgcgcacggcactgacgccaccagcaagatcaccaatgtcaaagccggtgacctgacagctggcagcactgacgccgttaacggctctcagctcaaaaccaccaacgataacgtgtcgaccaacaccaccaacatcaccaacctgactgacgctgttaacggtctcggtgacgactccctgctgtggaacaaaacagctggcgcattcagcgccgctcacggcactgacgccaccagcaagatcaccaatgtcaaagccggtgacctgacagctggcagcactgacgccgttaacggctcccagctcaaaaccaccaacgataacgtgtcgaccaacaccaccaacatcactaacctgacggattccgttggcgaccttaaggacgattctctgctgtggaacaaagcggctggcgcattcagcgccgcgcacggtaccgaagctaccagcaagatcaccaacttactggctggcaagatatcttctaacagcactgatgccattaatggctcacaactttatggcgtagcggattcatttacgtcatatcttggtggtggtgctgatatcagcgatacgggtgtattaagtgggccaacctacactattggtggtactgactacactaacgtcggtgatgctctggcagccattaacacatcatttagcacatcactcggcgacgccctactttgggatgcaaccgcaggcaaattcagcgccaaacacggcattaataatgctcccagtgtaatcactgatgttgcaaacggtgcagtctcgtccaccagcagcgacgccattaacggttcacaactttatggtgttagtgactacattgccgatgctctgggcgggaatgctgtggtgaacactgacggcagtatcactacaccaacttatgccatcgctggcggcagttacaacaacgtcggtgacgcgctggaagcgatcgataccacgctggatgatgctctgctgtgggatacaacagccaatggcggtaacggtgcatttagcgccgctcacgggaaagataaaactgccagtgtaatcactaacgtcgctaacggtgcagtctctgccaccagcaacgatgccattaatggctcacagctctatagcactaataagtacatcgctgatgcgctgggtggtgatgcagaagtcaacgctgacggtactatcactgcaccgacttacaccattgcaaataccgattacaacaacgtcggtgaagccctggatgcgctcgataataacgcgctgctgtgggatgaagacgcaggtgcctacaacgccagccatgatggcaatgccagcaaaatcaccaacgttgcggctggtgatctctccacaaccagtaccgatgctgttaacggttcccagttaaacgcaaccaatattctggttacgcaaaatagccaaatgattaaccagcttgctggtaacactagcgaaacctacatcgaggaaaacggtgcgggtattaactatgtacgtaccaacgacagcggcttagcgttcaacgatgccagcgcttcaggtattggcgctacagctgtaggttataacgcagttgcctctcatgccagcagtgtagccatcggtcaggacagcatcagcgaagttgatacgggtatcgctctgggtagcagttccgtttccagccgtgtaatagttaaagggactcgtaacaccagcgtatcggaagaaggtgttgtgattggttatgacaccacggatggcgaactgcttggcgcgttgtcgattggtgatgacggtaaatatcgtcaaatcatcaacgtcgcggatggttctgaagcccatgatgcggtcactgttcgccagttgcaaaacgccattggtgcagtcgcaaccacaccaaccaaatactatcacgccaactcaacggctgaagactcactggcagtcggtgaagactcgctggcaatgggcgcgaaaaccatcgttaatggtaatgcgggtattggtatcggcctgaacacgctggttctggctgatgcgatcaacggtattgctatcggttctaacgcacgcgcaaatcatgccgacagcattgcaatgggtaatggttctcagactacccgtggtgcgcagaccaactacactgcctacaacatggatgcaccgcagaactctgtgggtgagttctctgtcggcagtgaagacggtcaacgtcagatcaccaacgtcgcagcaggttcggcggataccgatgcggttaacgtgggtcagttgaaagtaacggacgcgcaggtttcccagaatacccagagcattactaacctgaacactcaggtcactaatctggatactcgcgtgaccaatatcgaaaacggcattggcgatatcgtaaccaccggtagcactaagtacttcaagaccaacaccgatggcgcagatgccaacgcgcagggtaaagacagtgttgcgattggttctggttccattgctgccgctgacaacagcgtcgcactgggcacgggttccgtagcagacgaagaaaacaccatctctgtgggttcttctaccaaccagcgtcgtatcaccaacgttgctgccggtgttaatgccaccgatgcggttaacgtttcgcaactgaagtcttctgaagcaggcggcgttcgctacgacaccaaagctgatggctctatcgactacagcaacatcactctcggtggcggcaatagcggtacgactcgcatcagcaacgtttctgctggcgtgaacaacaacgacgcagtgaactatgcgcagttgaagcaaagtgtgcaggaaacgaagcaatacaccgatcagcgcatggttgagatggataacaaactgtccaaaactgaaagcaagctgagtggtggtatcgcttctgcaatggcaatgaccggtctgccgcaggcttacacgccgggtgccagcatggcctctattggtggcggtacttacaacggtgaatcggctgttgctttaggtgtgtcgatggtgagcgccaatggtcgttgggtctacaaattacaaggtagtaccaatagccagggtgaatactccgccgcactcggtgccggtattcagtggtaatcatccattaacaaatgggtaaacgccacattgcctgatgcgctacgcttatcaggcctacggggtgattcagcactaccctgtaggccggataaggcgttcacgccgcatccggcaagataaggcgcaccagatcaacaatctgagggcaattctctgatgggaattgcccttttctttattacctctctcccagaattggccctaccaattcttcgcttatctgacctctggttcacaattccccaattaaaactcacatcaatgttgccaatgcataacatttagttaactatccattgtcattatccctacacaacacaattggcagtgccacttttacacaacgtgtgacaaggagatgagcaacagactcattacacggcgtgtgtggactgcaggagacctgcaatgaatctctggcaacaaaactacgatcccgccgggaatatctggctttccagcctgatagcatcgcttcccatcctgtttttcttctttgcgctgattaagctcaaactgaaaggatacgtcgccgcctcatggacggtggcaatcgcccttgccgtggctttgctgttctataaaatgccggtcgctaacgcgctggcctcggtggtttatggcttcttctacgggttgtggcccatcgcgtggatcattattgcagcggtgttcgtctataagatctcggtgaaaaccgggcagtttgacatcatccgctcgtctattctttcgataacccctgaccagcgcctgcaaatgctgatcgtcggtttctgtttcggcgctttccttgaaggagccgcaggctttggcgcaccggtagcaattaccgccgcattgctggtcggtctgggctttaaaccactgtacgccgccgggctgtgcctgattgttaacaccgcgccagtggcatttggtgcgatgggtattccgattctggtcgccgggcaggtaacaggcatcgacagctttgagattgggcagatggtggggcgtcagctgccgtttatgaccattatcgtgctgttctggatcatggcgattatggacggctggcgcggtatcaaagaaacctggcctgcggtcgtggttgcgggtggttcgtttgctatcgcacagtacctcagttccaacttcattgggccggaactgccagacattatctcttcgctggtatcgctgctctgtctgacactgttcctcaaacgctggcaaccagtgcgcgtattccgcttcggtgacttaggggcgtcacaggttgatatgacgctggctcacacaggttacacggcaggtcaggtgctgcgcgcctggacaccgttcctgttcctgaccgccaccgtaacgctgtggagtatcccgccgtttaaagccctgttcgcttcaggcggtgcgctgtatgagtgggtgatcaacattccggtgccgtacctcgataaactggttgcccgtatgccgccagtggtcagcgaagcgacagcgtatgccgccgtgtttaagtttgactggttctctgccaccggtaccgccattctgtttgctgccttgctctcgattgtctggctgaagatgaaaccatctgacgctatcagcaccttcggcagcacgctgaaagaactggctctgcctatctactccatcggcatggtgctggcgttcgcctttatctcgaactattccggactgtcatcaacactggcgctggcactggcgcacaccggtcatgcattcaccttcttctcgccgttcctcggctggcttggggtattcctgaccgggtcggatacgtcatctaatgctttgtttgccgctttgcaggctaccgccgcacaacaaattggcgtttctgacctgttgctggttgctgccaacaccaccggtggtgtcaccggtaagatgatctccccgcaatctatcgctatcgcctgtgcggcggtaggcctggtgggcaaagagtctgatttgttccgctttactgtcaaacacagcctgatcttcacctgtatggtgggcgtgatcaccacgcttcaggcctatgtcttaacgtggatgattccttaatgattgttttacccagacgcctgtcagacgaggttgccgatcgtgtgcgggcgctgattgatgaaaaaaacctggaagcgggcatgaagttgcccgctgaacgtcaactggcgatgcaactcggcgtgtcgagaaattcactgcgcgaggcgctggcgaaactggtaagcgaaggtgtgctgctcagtcgacgtggcggcgggacgtttattcgctggcgtcatgacacatggtcggagcaaaacatcgtccagccgctgaaaacgctgatggccgatgatccggattacagtttcgatattctggaagcccgatacgccattgaagccagcaccgcatggcatgcagcaatgcgcgccacacctggagaaaaagaaaagattcagctttgctttgaagcaacgctaagtgaagacccggatctcgcctcacaagcggacgttcgttttcatctggcgattgccgaagcttcacataacattgtgttgctgcaaaccatgcgcggtttcttcgatgtcctgcaatcctctgtgaagcatagccgccagcggatgtacctggtacccccggttttttcacagctgaccgaacaacatcaggcggtcattgacgccatttttgccggtgatgctgacggggcgcgtaaagcaatgatggcgcaccttagctttgttcacaccaccatgaaacgattcgatgaagatcaggctcgccatgcacgtattacccgcctgcctggtgaccataatgagcattcgagggagaaaaacgcatgattatttccgcagccagcgattatcgcgccgcagcgcaacgcattctgccgccgttcctgttccactatatggatgggggggcatattctgaatacacgctgcgccgcaacgtggaagatttgtcagaagtggcgctgcgccagcgtattctgaaaaacatgtctgacttaagcctggaaacgacgctgtttaatgagaaattgtcgatgccggtggcgctaggtccggtaggtttgtgtggcatgtatgcgcgacgcggcgaagttcaggctgccaaagcagcagatgcgcatggcattccgtttactctctcgacggtttccgtttgcccgattgaagaagtggctccggctatcaaacgtccgatgtggttccagctttatgtgctgcgcgatcgcggctttatgcgtaacgccctggagcgagcaaaagccgcgggttgttcgacgctggttttcaccgtggatatgccaacgccgggagcgcgttatcgtgatgcgcattctgggatgagcggcccgaacgcggcaatgcgccgctacttgcaggcggtgacgcatccgcaatgggcgtgggatgtgggcctgaacggtcgtccgcatgatttaggtaatatctcggcttacctcggcaaaccaaccggactggaagattacatcggctggctggggaataacttcgatccgtccatctcatggaaagaccttgagtggatccgcgatttctgggatggcccgatggtgatcaaagggatcctcgatccggaagatgcgcgcgatgcagtacgttttggtgctgatggaattgtggtttctaaccacggtggccgccagttagatggcgtactctcttctgctcgtgcactgcctgctattgcggatgcggtgaaaggtgatatcgccattctggcggatagcggaatacgtaacgggcttgatgtcgtgcgtatgattgcgctcggtgccgacaccgtactgctgggtcgtgctttcctgtatgcactggcaacagcgggccaggcgggtgtagctaatctgctaaatctgatcgaaaaagagatgaaagtggcgatgacgctgactggcgcgaaatcgattagcgaaattacgcaagattcgctggtgcaggggctgggtaaagagttgcctgcggcactggctccaatggcgaaagggaatgcagcttaagggttagacgaatatctgctatcctgcccccgcactaagggggcagtatgctaaacatcgtactttacgaaccagaaattccgccaaatactggcaacatcatccgtctttgcgctaataccggctttcgtctgcatatcatcgaaccgatgggatttgcctgggacgataagcgcctgcgccgcgcggggctggactatcacgagtttaccgccgttacgcgtcatcatgactatcgcgcgtttctcgaagcagaaaatccccagcgtctgtttgccctcaccacgaaaggtacgcctgctcacagcgccgtaagctatcaggatggcgattatctgatgttcggcccggaaacacgcggcctgccagcgagcattcttgatgccctgcccgctgaacaaaaaattcgtattccaatggtgccggacagccgcagcatgaacctgtccaatgcggtgtcggtggtggtgtatgaagcctggcgccagctggggtatccgggagcggtgttgagagattaagatgcggtaggccggataaggcgttcacgccgcatccggcacgatcacagaatgtcagatcccatcaccatactcaaacgtatggttaatgccgttgaaatgctgatccatatccattgacggtttatcgctatccggcttgccgacaatgcgtgccggaacgccagcggcagtggtgtgcggcggcaccggttgcagcaccacggaacctgcgccaatcttcgcgccgcgcccaacttcaatattgccgagaattttcgcgcccgcgccaatcatcacgccttcacgaattttcgggtgacggtcaccaccagatttacccgtaccgccaagcgtcacagattgcagaatcgatacgtcgttttcaatcaccgccgtttcaccaacgacgatgcctgtcgcgtggtcgagcatgataccgcgaccaatttttgctgccgggtgtatatcaacctggaacgttacagagacctggttttgtagaaaaatagccagcgcgcgacggccctgattccacaaccagtgaccgatgcgatacgcctgcaaagcatgaaaacctttcagatataacaatggggttgagtatttatcgactgccgggtcgcgggtacgcactgcctgaatatcacaggccgcagaagcaatcatttccgggtcggcggcgtaggcttcttccaccacttcacggatagcaatagcaggcataattggcgatgacagcttgttcgccagcatgtagctcaatgcactgccaaggttttcatgcttgagtagcgttgcgtggtaaaaactggccagcattggctcacagtccgccagcgttctggcttccgctttaatattgttccagacaatttccagttcttcacacgacattgcttactccacacgatgagataatgaccggctcgttctgcgcgagccgggtcatagcggtaacaaaggttccctgggtttagtggctactgcgctcgtccttgcgtgcacgacctaataaagtcaatgctgcctcgcgcgcgttttttccgcaatataatacttgataaatttcctcggttattggcatttcaacgccgaagcgatgcgccagttcgcggacttctttcgtattgcggtagccttccaccacttgaccaattttctcctgcgcgctttgtacatccatgccctgaccgagcatcatgccaaaacggcggttacgcgactggttgtcggtacaggtcagcaccagatcgcccagccccgccatgcccataaaggtggcaggatcggcacccagcgccgcgccaagacgcgacatctcagccagcccacgggtgatcagcgccgtacgcgcattcgcgccaaaaccgataccgtcggacatccccgcgccaatggcaatgacgtttttcaccgcaccgccaagctgcacaccgatgaaatccgggttgctgtaaacgcggaaacttttgccacagtgcagcaattgctggaggtcatcggcaaaggtctggtccgtcgaggccagcgaaatggccgtcggtaaacctgccgccagttctttcgcaaacgttgggccagagataaccgccagcggaatttgatcgcctaaggcctcacgcgccacgtcctgtaacagacgtccggtttctgcttccagccctttggtcgcccacaccagacgcgcatcaggacgcatcagcggtttaatctggcgcagcacttcaccaaagacatggctgggtacgacgacgagaatattacggctggctgccagcgcagtggcgagatcgctttcaagatggagcgtatcgggaaaaggcacatcggggagaaacgcggcgttacagcggtcgcgttcaagcgttgcgatatgttcagggtcatggccccagaggacaacctcgtggccatttcttgccagggtgatggcaagagcggtgccgtacgagccggcaccgatcacagtcattgaagcattacgttggttcatcaggcatcctgatgttcttcagtaccttcgccagcctgctgctgcaaatagttcatgaacagcgcatcgaagttaaccggcgcaaggttcagttgcgggaatgtaccgcgggataccatgctggtgatgcactcacgagcatacgggaacagaatgttcgggcagtatgcgcccaggcaatgtgccatctgggtgccttcgatacccgcgatggagaaaataccgccctgctgaacttcacacaggaacgcggtttcttcgcccagggaggccgttacggtaacacgcagtaccacttcgtaaacgtcatctgccagttgagaagatgccgtatccagatcaagtttaacttctggctgccaatctttctggaaaacgtgcggcgcgttcggcgcttcgaaagaaatatccttggtataaatacgttggatctggaaagtcatttcggtgttgttttgttctgacatgtgtagaaaacccttaagtgttgtccttaaaatactgcgcaatgtaatgccaacgttcacacgttatttcagcaggggatccagtccaccacgtgcatccaatgcatacaagtcatcacagccaccaatgtgctgtgcgtcaataaaaatctgtggaaccgtggtgcgaccgctgcgtttgatcatctcttcacgcttagcggcattgccatcgatcggcaactcctgaaaactcacgcccttgctgctcagcagtgcttttgcacgatggcaatacgggcaggtttctttggtatagatttcaacattggccataaattagctcctgttttttaccctgaaatttcatgttgcagggcggcagcaaaatggagtgtccccagaagcttataacaataagtcgctgggggcctaattgcagctaacggcctgcatcatgaaaaacggcaggtaaattatttgccgcgcaccaaaggcaagttttcgccagcccagccagcgacgccttctttcagtacgaatacttgcgcaaaaccagctttcgtcagcgcgtttgcaggctcctggcactgcatgccagaaccatctaccacgataaccggtttgtctttgtgcttctcaagctcaccaacattgttggctttgatttcgctcggcaacaggttgatagaacctgcgatatggcctttacggaagtcatcacgctgacgtaaatccacaaccacagcgtcttctttgttgatcagacgcgtagcttcaccacgagtaatcaccttcactttcgaggtcaggctcttaaacgtagtcacaagaaccgccaccagtaacgcgatccaggcgatactcagtatgggatgacggccaacaaattgcataatttcttgcatggggggtaacaactcccgacgtagtgattaaaaaaaccaggaaaggagtatacctgcgcagtgcggcaaatacagccagcgcgttaactggaatgcaattttgcggggcgcgacgaaaaaaaagcgtaaatctggcatctgcttgccgcgagcggtcgtatattttgatcttcagaggctattttatcgattcagctgtagtaaaattacgcaaattttgactcttgagtatgaggttgtcgcaatgtcggtttctaaaaaacctatggtactggtgattctggatggctatggctatcgcgaagaacagcaggataacgccatttttagtgctaaaaccccggtaatggatgcactgtgggccaatcgtccgcataccctgatcgacgcttccggtttggaagtcggtctgcctgaccgtcagatgggcaactccgaagtaggccacgttaacctgggtgccggccgcatcgtgtatcaggacctgactcgtctggacgttgaaatcaaagatcgcgctttctttgctaatccggtgttgactggtgcagtagataaagcgaaaaacgcaggcaaagcagtacacattatgggtctgctctccgcaggtggtgtacacagccacgaagatcacatcatggcgatggtagaactggcagctgaacgcggcgcagaaaaaatctacctacacgcattccttgacggtcgcgacactccgccgcgcagtgctgaatcctcgctgaaaaaattcgaagagaaatttgccgcgctgggtaaaggccgcgtagcgtccatcattggtcgttactacgcgatggaccgcgataaccgttgggatcgcgttgaaaaagcttatgacctgctgactctggcgcaaggtgagttccaggccgataccgccgttgccggtttgcaggctgcttatgctcgcgacgaaaacgacgagttcgtgaaagcgaccgttattcgtgcagaaggtcagccagatgcggcaatggaagacggcgatgcgctgattttcatgaacttccgtgctgaccgcgcgcgtgaaatcactcgtgctttcgtgaacgctgatttcgatggcttcgcgcgtaagaaagtggttaacgtcgatttcgtgatgctgaccgaatacgctgccgacatcaaaaccgcagtggcttacccacccgcttccctggttaacaccttcggcgagtggatggcgaaaaacgacaaaactcagctgcgtatttccgaaaccgaaaaatatgcccacgttactttcttcttcaacggtggcgtagaagagtcgttcaaaggcgaagatcgcattctgatcaactcaccgaaagtggctacctacgatctgcaaccggaaatgagctccgcagagctgaccgaaaaactggttgcggcaatcaagagcggcaaatacgacaccattatctgtaactatccgaacggcgacatggtaggtcacaccggggtgatggaagcggcggttaaagcggttgaagcgctggatcactgcgtggaagaagtcgcgaaagcggttgagtccgtgggtggacaactgctgatcaccgctgaccacggtaacgctgaacagatgcgcgatccggcaacgggtcaggcacacacagcacacaccaacctgccagttccgctgatttacgttggtgataagaacgtgaaagcggttgaaggcggcaaactttctgacatcgcgccgaccatgttgtcgctgatgggtatggaaatcccgcaagagatgactggtaagccgctgttcatcgtggaataatccctccccatgaggggaaaggcgattaataccatgacacgggccgtgaaaccgcgcaggtttgcaatcaggcccatcatctacgccagcgttctgagcgctggcgtattgttgtgcgccttttccgcccacgcggatgagcgtgaccaactcaaatccattcaggctgacatcgccgcgaaagagcgcgcggtacgccaaaagcaacaacaacgcgcaagcctgctcgcacaattgaaaaagcaggaagaagcgatctctgaagccacccgtaaactgcgcgaaacgcaaaacacgcttaatcaactgaataaacagattgatgagatgaacgcgtcgattgccaaactagagcagcaaaaagccgcccaggagcgcagcctcgccgcgcaactggatgccgcgtttcgtcagggtgaacataccggtattcagctgattctcagcggtgaagaaagccagcgtgggcagcggttacaggcttatttcggctatctcaaccaggcgcgacaagaaaccattgctcagttgaaacaaacgcgtgaagaagtcgctatgcagcgtgccgaactggaagagaaacagagcgagcaacaaacgcttttatatgagcagcgcgcccaacaggcgaagctgacccaggcgttgagcgagcgtaagaaaacactggcagggctggagtcttccatccagcaaggtcagcaacagttgagcgagctgcgcgccaacgaatcccgtctgcgtaacagcattgcccgtgcggaagccgcggcgaaagcgcgtgctgaacgtgaagcgcgcgaagcccaggcggttcgcgaccgccagaaagaagcgacgcgcaaaggcaccacctacaagccgaccgaaagcgaaaaatcgctgatgtcccgtaccggtggtctgggcgcaccgcgcggtcaggcattctggccagttcgcgggccgacgctgcatcgctatggcgaacagctacagggtgaattacgctggaaagggatggtgattggtgcctctgaaggtactgaagttaaagcgattgccgacggccgggtgattctggctgactggctgcaaggctacggtctggtggtggtggttgagcatggtaaaggcgacatgagtctttacggctataatcagagcgcactggtgagcgttggttcgcaggttcgcgcgggccagccaattgcactggtgggcagcagtggcggtcagggtcggccttcactctatttcgaaattcgccgccagggtcaggcggtcaatccacagccgtggttgggaagataagttttgtttccatttcgtcgtaacgttcttgcatttgccgctctgttggcgctctcctcccccgtaattgctggcaaacttgccatcgtcattgatgattttgggtatcgcccgcacaacgaaaaccaggtgctggcgatgccttccgctatctccgtcgctgtattacccgattcaccgcacgccagagagatggcgaccaaagcacataacagcggtcacgaagtgttgattcatctaccgatggcaccactgagtaaacagccgctggagaaaaatacgctacgcccggagatgagcagcgacgaaattgagcgcattattcgtagtgcggtcaataacgtgccctatgccgtggggatcaacaaccacatgggcagcaagatgacctctaacctgtttggtatgcagaaagtgatgcaggcgctggagcgttacaatctttacttcctcgacagcgtaaccatcggtaatacccaggcgatgcgcgccgcgcaaggcactggcgtgaaggtgatcaaacggaaggtgttcctcgacgattcgcaaaatgaagcggacatccgtatgcaatttaatcgcgcaattgacctggcacgtcgcaacggttcaaccattgccattggacatcctcacccttcaacggtacgcgtgctacaacagatggtttataacctgccgccagacattacgctggtgaaagccagcagcttgttgaatgaaccgcaggttgatacgtctacaccgccgaaaaacactgtgcccgacacaccgcgtaatccattccgtggcgtgaagctgtgcaaaccgaagaagccgatagaacctgtttatgctaatcgcttctttgaagtattaagcgaaagcatcagccagagcacgctgatcgtttacttccagcatcagtggcaaggctggggcaaacagcccgaatcggcaaaacttaacgctagcgcaaattaaaggcgctacgcgtaatgcgatggtgcgaccgcgttttgtcgcgccattgccataagcggaaagaccacagtaacgcctggtaacccaccttcacgctgcgcacattggtaatcaggcgcttatacataccggaagtaaatatctcagcaatcatccgttggcgggtaataatatccggctctttgcgcaccgcatggcaaacacgcaatgcttcgtaagttatttgctgatgaaattccggataaatcgtaattttgtcggcataatttcgatttaatttctccagcaggcgggtaatcttaatatagtgacgttgataattaaggtttttattcccttgtctatgcaaccgactcactgacgtattatgcagataatatttatataatgattgctcggtatatcgcgcacgcagcgcgttaaacataaattctgttgtccagacaatatcctgatgatgtaatccggcaataaatttaatgttatttttaacaataacatcgcggcgataaacccccatccagaccacgtgtgtccaacggcgggaagaaagtcccatccgcagccagtccggaccagttaatacaccggttgagcgaaggcgatcggtagggatggattgccaggtttcacccgtttcacgaaaacaccaatcagcgttgcactgcgccacgtcgaggtcgtcctctaacgccatggtcatcagcgtttcgtacatggtgggatagacctcatcgtcagcatcgacaaaagcgacatattttcccgttgccacttcaatcccacgattacgcgccaccgatgcgccagaattcgcctgatgcaacaaacgaacgtgcggatagttttctgcgtaatgctttgctatttcaacagaattatccgttgaaccatcgttaataataatgatttccagagcagtccatgtttgcgtaattaaagattccatacaagtgcggaaatcatcgcccgcattatataacggaataataacactaagtttattggtgctgttcatcataaattaccgacgacctctgaagttatcctgacgttttacaggctttgtattaagaaactattaagcctgtgagatattatttttaccggtgagagagtcacgtcagggtagagagataatgagagcagctatataagagatcagcgcaattacgatatcttgattacactgacaggattttacatatttaacggattatcctcaggcaaaagggctggaataccagcccttgttcgtgttaatcccagctcagaataactttcccggactggcccgaacgcatagcgtcaaagcccttctggaaatcatcgatagagaaacgatgggtaatgatcggcgagagatcgaggccagactgaatcagcgccgccatcttgtaccaggtttcaaacatctcacgaccgtaaatacctttaatgaacaagcctttaaagattactttggtccagtcgatagacatatcggacggtggaatacccagcatcgcaatacgaccgccgtggttcatggtgtcgagcatggtacgaaacgctggcggcgcaccggacatttccagaccgacatcaaagccttcggtcatgcccagttctgtcatcacatcattaaggttttctttagcgacgttaaccgcacgggtgatacccattttgcgtgccagctcaaggcggtattcgttaacatcagtgatcaccacattgcgtgcaccaacgtgtttcgccaccgccgcagccataatacctatcggacctgcaccagagaccagcacatcctcgccaaccagatcgaacgacagcgcggtatgcacagcgttaccgaagggatcaaaaatggaagccaggtcgtcggagatattgtccgggattttgaaggcgttgaacgccggaatcaccagatactcggcgaagcagcccggacggttaacaccgacgccgatcgtgttgcggcacagatgggtacgaccgccacgacagttgcgacagtgaccgcaggtgatatggccttcgccagaaacgcgatcgccaatcttgaagcctttcacttcctgaccaatacctaccacttcaccgacatattcatggcccacgaccatcggcaccgggatggttttttgcgaccactcatcccagttatagatgtgaacgtcagtcccgcagatggctgttttacggattttaatcagcagatcgttatgcccgagttccggtacaggaacgtcggtcatccagatgccctcttccgctttcagtttggataacgctttcatctcacaccctcaggcgataacgcccagttgtttaccaatacgcgtgaatgcttctactgcacgcgtaatttgctcaggggtatgcgccgcagacatctgggtacgaatacgcgcctgacctttaggaacgaccggatagaagaaaccggtgacgtaaatgccctctttttgcagctcacgggcaaatttctgcgccactaccgcatcgccaagcatgacgggaataatggcgtgatcggctcccgccagggtaaagcccgccgccgacatttgctcacggaactgacgcgcgttcgcccacagacggtcacgcagctcgctacccgcttcgaccatctccagcactttgatggatgcggcgacaatcgccggtgccagcgagttggagaacaggtacggacgagaacgctggcgcagccactcaaccacttctttgcgcgccgcggtataaccaccagaagccccgcccaatgctttacccaacgtaccggtaatgatgtctacacgccccatcacatcgcagtattcatgggaaccacgaccattttcaccgacaaaaccgaccgcgtgggagtcgtctaccatcaccagggcatcgtatttatctgccagatcgcaaacgcccttcaggttggcaatcacgccgtccatcgagaacacaccatcggtggcaatcagcacatgacgcgcaccggcttcacgcgcttctttcagacgtgcttccagctcctgcatatcgttgttggcataacgatagcgtttggctttacacagacgcacaccatcaataatagacgcgtggttcagtgcgtcggagataatggcgtcctccgcgctcagcagcgtttcaaacaggccaccgttagcatcaaagcaggaagagtagagaatcgcatcttccatccccaggaatgccgccagtttttgttcaagctctttatggctgtcctgggtaccgcaaataaaacgcaccgaagccatgccgaaaccgtgagaatccattcccgcctttgccgccgcaatcagatccggatgattcgccagtccgagatagttgttggcacaaaagttaatgacgtggcttccatcagccacagtgatatctgcttgctgcgcagacgtaataatgcgctcttctttaaacaacccttccgcccgtgcggtttccagatcgttggttaactgctgataaaattctccacgcattgcgattctccagacagggcaaattccagcacatattacccaaacttataggtcgcgacgagatgacgcgttaacacttctgcaaaattcaggataaataacgtccagccccctcacttttggtgaatggctgaagccaacgtcatgtagtgatatgatagaagtattcgtgtctgagattgtctctgactccataattcgaaggttacagttatgatcatcgttaccggcggcgcgggctttatcggaagcaacatcgttaaagccctgaatgataaaggcatcaccgatattctggtggtggacaacctgaaagacggcaccaagtttgtgaacctggtggatctggatatcgcggactatatggataaggaagacttcctgatccagattatggctggcgaagagttcggcgatgtcgaagcgattttccacgaaggcgcgtgctcttccaccaccgagtgggacggcaagtatatgatggataacaactatcaatactccaaagagctgctgcactactgtctggagcgcgaaatcccgttcctgtatgcctcttccgcagccacttacggtggacgcacctccgactttattgaatcccgcgaatatgaaaaaccgttgaatgtctacggttactcaaaattcctgtttgatgaatatgttcgccaaatcctgcctgaagcgaactcacagattgttggcttccgttatttcaacgtttatggaccgcgtgaaggccataaaggcagcatggcgagcgtcgctttccatctcaacacccagcttaataacggtgaatcaccgaagctgttcgaaggtagcgagaacttcaaacgtgacttcgtctatgtgggcgatgtggcagatgtaaacctgtggttcctggaaaatggcgtttccggcatcttcaacctcggcaccggtcgtgcggaatccttccaggcagtagcagatgctacgcttgcttatcacaagaaaggccagatcgaatacattccgttcccggataaactgaaaggccgctaccaggcgttcactcaggcagatctgacgaatctgcgcgcggcgggttacgataaaccgttcaaaaccgttgccgaaggcgtaacggaatacatggcctggctgaatcgtgacgcataagagctctgcatgaaaatactggtgatcggcccgtcttgggttggcgacatgatgatgtcgcaaagtctctatcgcacgctccaggcgcgctatccccaggcgataatcgacgtgatggcaccggcatggtgccgtccattattatcgcggatgccggaagttaacgaagcgatccctatgcctctcggtcacggagcgctggaaatcggcgaacgccgcaaactgggtcatagtctgcgtgaaaagcgctacgaccgcgcctacgtcttacctaactccttcaaatccgcattagtgcctttcttcgcaggtattcctcatcgcaccggctggcgcggcgagatgcgctacggtttactcaacgatgtacgcgtgctcgataaagaagcctggccgctaatggtggaacgctatatcgcgctggcctatgacaaaggcgttatgcgtaccgcacaagatctgccgcaaccattgttatggccgcagttgcaggtgagcgaaggtgaaaaatcatatacctgtaatcaattttcgctctcatcagaacgtccgatgattggtttttgcccgggtgcggagtttggtccggcaaaacgctggccacactaccactatgcggagctggcaaagcagctgattgatgaaggttatcaggtggttctgtttggctcggcgaaagatcatgaggcgggcaatgagattcttgccgctttgaatacagagcagcaggcatggtgtcggaatctggcgggagaaacacagcttgatcaagcggttatcctgattgcagcctgtaaagccattgttactaacgattctggtctgatgcacgttgcggcggcgctcaatcgtccgctggttgccctgtatggaccaagcagcccggacttcacaccaccgctatcccataaagcacgcgtgatccgcctgattaccggctatcacaaagtgcgtaaaggtgacgctgcggagggttatcaccagagcttgatcgacattactccccagcgcgtactggaagaactcaacgcgctattgttacaagaggaagcctgacggatgcgggttctgatcgttaaaacatcgtcgatgggcgatgttctccacacgctgcccgcactcactgatgcccagcaggcaatcccagggattaagtttgactgggtggtggaagaagggttcgcacagattccttcctggcacgctgccgttgagcgagttattcctgtggcaatacgtcgctggcgtaaagcctggttctcggctcccataaaagctgaacgcaaagcgtttcgtgaagcgctacaagcaaagaactatgacgcagttatcgacgcccaggggctggtaaaaagcgcggcgctggtgacgcgtctggcgcatggcgtaaagcatggaatggactggcaaaccgctcgcgaaccgttagccagcctgttttacaatcgtaaacatcatattgcaaaacagcagcacgccgtagaacgcacccgcgaactgtttgccaaaagtctgggctatagcaaaccacaaacccagggcgattatgctatcgcacagcatttcctgacgaacctgcctacagatgctggcgaatatgccgtatttcttcatgcaacaacccgagatgataaacactggccggaagaacactggcgagaattgattggtttactggctgattcaggaatacggattaaacttccgtggggcgcgccgcatgaggaagaacgggcgaaacgactggcggaaggatttgcttatgttgaagtattgccgaagatgagtctggaaggcgttgcccgcgtactggccggggctaaatttgtagtgtcggtggatacggggttaagccatttaacggcggcactggatagacccaatatcacggtttatggacctaccgatccgggattaattggtgggtatgggaagaatcagatggtttgtagggctccggggaatgagttgtctcaattgacagcaaatgctgttaagcaattcattgaagaaaacgctgaaaaagctgccatgatttaaattacaactctttaatagataattttgaaataaaatcagcttccttgctgattttatttcacatattcattacttatctaataaacattggtccgattgtactttaaaataagcacaaagcaatattatggtgacaaacacagcagtcggaaccggtttagaaaagagtattacatcacttaggcctactaccagtagtgaaaaaagcaagattaaaatataaggttctttagcagttcttaaggcatatatgaatattgctgaaaaggctaaaattgttaatgctactccaggaataccacgcgttgataacgtatctatgagatcgttatgcaaatgagaatctacaaagggtaaagcaccacttaatctaggctctttctcttctagttcatgtattttttccgcacgtttttccagtgattgtcctattggagaatatgtttttaaaccaacttcatacattgccagacgggcaccgactgaagttctggtgttatcatgcgaataattaactaaatccctatttaagtcattcattctcgtaagtaatgtatctttaaaagaaaatacacctgctaataatgcaatcgcaataaaacaatataacttataattaattcgcttattaatataactatccattacgattaatagtaacgcaaagaatggaaacactaatatggctgcacgcgtttcagttactataacagcacataagctaagcatgaagttaattgtatataatgttgttttatgtctaaagtcggattttaaaatgagaattgatgccagtaaagaagggaaaaggatgatgtagcctgctgttgtagcgtgggaagctgataatgcaacacggtcgacgtttaaatagaaatgttgccacatggcatgcgcaaaaaaaagtaactgcgttgccaaggatgcgaacagaattagtttcccaaattttattttggttctcatctcatctttagcaaaaagaactaagaaaataaaagcactacacaaggcaatttttccagtttccattgggccacgatatgcattggtataaaccgagcctgaaactttataatgtgaataccagatgatattaacgatacccaaaagacataatgagatgaaaattaacaaagtaggattattagttattgttttttttggtgtcgctagaaaatataatgcagatataattccagctgcatgaagaaactttgttgcaacatcatcccacaaagacaaagtcattaaagacaacatacataatatgagaattaaagacttgacaccagagttaatttcattccaacaaaacgacatataatttcaacctatgctacgaggatgggttatttaatgcaagacctaacgtttattcttttttctatttaccagtcttaccatcctccagagaatatagttttttgatgctaatatctttgctcgcctcttatctctcttgccaagaagattacaatctttcaattctttttcattgctttcaactaattgatttaataattcaaaatcgccattaagtagaacattccataaataacgagttttatgataagttctatttttactcaataatgtatgaatttcttctttccggttacctttgtataactgcatcacagaagagtagattctttcgtgcgcaaatgactcatgtcgataatgagtgatggttctacatgagttcattaaggaattttctctatagttatgcttatacatataatatggaaccgcatacatatcgcatgtaattagcagtcgatagataaaatccagatcttctcctagtcgtaaatcttcatcaaaaaaaagattattatcttccaggagttgttttcttataaacaagcatcctatatggaatctgacctttttataaaaaaaatcgaaaagtaaagacccttcattaaaatctgtatttataggtgagtaagtaacaccattttttatatgatggccataaagcccacaataaatcgcatcccctcccgtctcatgttgtctggaatacatcttcagcagatagttaggatctatctcatcatcatcatccataaaacatataaactgtccttgcgccttgcggatacctgtattcctggcagacgaaacaccgccattttctttattgataataattaatcgagagtgggttaacccatactctctcaaaacacttgatgtgttatctttagaaccatcattaacaataacaatttcaaaatttgggtaagtttgtttttctaatttcgttagagtttcagtaatgtaatcagatgaattatacgtcggtattattatggatactaaagggtaatcattgctcatcgtgttctcttgcctgaactaataaaatattatagtactcatccttaattattattgtaactcagacatccatgatttttattattgcccaaatagttttcttttatacttatttaatttgaatttaatgaagtaaataaaagcgttaaacgtatcaccatttttctttgcatgttggtatttcacttgatactgcttttcattcgtggctggaataaacgccacatcattccagcaagaaacctgataagcctcattaaaatacttctggcagggataattcgtccagtcgttccagggcttcgttacgccaacataatgaatcagcttagtatcatcggtaatggtctttttataatcttcatcgcttttattttttaactcatagtcaatgccataaaagcaatcataatcgccgctaataaaaatacaatgactaaagaacagaatatttaaaatatcctgatcaaggcatttatatttcgtgtgctgcgggtcacttgccagcatagcaatggctttattcataaaatcatttttcgcccatgcttcaagctgcagatatactacaccggcgttgaaataattccctggaagtccctctatagccagacgcttcgctggtttttcctgcataaaaggcacatctttaataacagccgcgaacttatcgccatcaaaattaatatcaagcaatccagctaatgagcctttacagatgacatcagcatcgatatataacagattttcaatagtttcactcagatactggaacgcaactaaacggaagaatgttgcataagaccactgtttcaggctggggaagatatcaataaaggcactggatactttataaattcttacttcaacgttagcatttttgctggtaaaagcattaacacgttgtagataatcttcatcaatgtagtcagtaaagagatgaaacttaaccgcaaggtccgggttatgcataacaactgattgcatagatactgccgcaccaaataaaaagttgcggtcaataccgtaagcgatatttaacacacgatcggtgttagcaatttccccagagacagcgacttcagtaatactctcagctaataaatccatgttggttccgttttgactgtgtggtttacgctttgccttttaattttttaataaatttgcgtagtttggttctgtagattactgaatagtagccataatcttttatttcgttggcaatacccaggtgacgttccatggccagacgatcacgggctttccgctctgccgtacagcttttaccggataggtcaattatcctgacaccatctttactaacgataaagttaccccggtgtgggtcgcccgatagcatatttaaggcatgcaatttttccattgaagccttaatttctgctttaacatcttctggaataatcggcatatcattgagctctacgccctcgacatactcgataagcatgataaaaacactggcatagttgaaaattttacgctcagccagaaaataaaaatcattaggaaaagtaagacctgcacttctgacacgatcggtttcaacgatcaaattctgatagtagtcaccttttacaaaagattttaaaaaacgttcattccttttcgttttcggggcaaagactttaaaaacatagcgaccatatttcgtatcaatcaacgatactttggtatcatcaatattacgtaatacttttactgttttaaaattataggccagtatttcatcaaagatttctttatatttattatcgttatctttgtaataaaatgagaagccgcgatagcgtatacttgtaatcataagagtaatttatttcttaagcttgtacttaattaatgaagttatacctttaatatactcaccatgggcaaacagatgcttatattgtttctgcatttctgcaacagtccgcgcctctttaagaggatatttcttccagggagattgttcacgcgcgatattaaagtatgatgcagacggatatccagcccagctatgccatggtttagttatccctgtatagtgaatcaatactgttttatcggtaatggtttgctgatactttcgatgactacgatcatgaagttcgtttttcagggtataaatagtatcaaaatccttcgcgaggtagatattattcatattaaatgcgatattcaacgcatcctgatctaaatatttaagagagccatatttagtttcccctcgtaaaagcgtgagtaaatacggtgtcaaatttgcttcatgccattttttaagattgacatagataacgcctgcattgaaataacgtccattcattccgggaatgttaagacgttttgcacatgccgcctgagtactatcattgtcaggaataaccgcagcaaactcatctttaaatataatttttgtgagaggtttcagacttcctttacaaacgacatcggcatccagatacagcagtgtggaaatactttcactcagatattcaaaggacaataccctgaagtatgtcgcgtacgaccaaaactgtgacgtcggcagatcagcaaagtattttgggtcaattaaatatacaataattgaggtattaaattgttttgctgtttcattaaatgactttaaataatcatcatccacataatcagtgaaaacatgaaagacaaaattaatatctgaattattaatcaaaacggaagaaattgaaacgccagcaccatacaaaaaattcttatcgataccgtaggaaacatttagctctgggacgttttcttttttattatctgctaaatacgaaaaccgttcttttataaattcattcatttaacttttctcaatgtcattttattatctttaaataaaaataataaatataattcattatcccgttaattggtttattttgtttaaaattatgcttagcgcaataacgagcataatttgagttcattggccgcattaacggttcatttttccagggcgatgcttctttgcctttgataaatggctgcgcgcttggataaccggcccagtaatgccagggttttgtcgggccgacataatgaattaatacggtttcatcattaattggacaaataaatgatttttttaattcataatttaaactaaattgcgtattgtatttagcatcaatgaatttaactttccctaacaggataagattaagtatatcttgatccatataggttaaacgggaaacgacggctttatcagcaagcatcgacatcgctttagcagaaacggactcctgcgcccacgctagtgtattaattaacaggacacctgaattaaagtaacccttttcaagttcattacactgcagactttgagctcgtaatgaccaccagttagcatcgcgttcagtaacaacagcagcaacgttattggcaagatccattgttatcagcggctttaagtttccctgacaggcgatatcagcatccaggtacaggatcttatcttgttgatcaataaagtaatctgcaattacaaaacggaaatacatggcaatagaccaatttttggtcgtcggtaatgccttaagccgttcacaattcaccagatggatctggatacaggtatgatagcttttcgctaattgggataaacgctggatatcggcttcagggatatcatcaataaaaacgtggaaaacaaaactcacgtcgttgttatgtaacaaaactgacgtgattgaaacaccacaaccaaaaagaaagttctgatcaatgccataagcaacatggaatgatgatgccactgacaccgctggcctttcatcgaagatgattgtcttattgatcatctcttgtggattaaaatagtgggcactcatatttctctccggaaattacaacgattttcgaatcgttctttccctgatttttgtggcttttgcttctgcttgcgacagcagcccttgttcctgcttgagaatgtctttaagcggggcagaaaaatacaccttcatgaaccgccagatatcccgttgagtcaggccaatattcatcgaagaaaaataaagtccaataagatctttatcgcgccaacgacgtggaacgcgcgtgcgaagctgcgcccggtgcaggtcaattactgaaatttttaactcctcttccttaccggaaaaaggcaagtgcagcaggaaatgacagatataacagtcacggtggttaatgcccgcagcatgcatatcgcgcaccatcgtcgcgacacgcttaataagcatacgctttacgcgaacatctggtgggttggtcgcccagtcagcacagtaatcttccagactgatggttggtgtcagatcttcggtaataataaacgaggttctggtcagcggattaatgcctttttcgccgaatgccaccccatacatagtatcaacgccgacatcccgcagtcgatgaatcgcattccattcgcggtctgcgcctaatactggcatccgcaatgagagtaaatttttgattatctctttcagggtcgtgccgcgatgccatttgagaaaatagcttttgcccgccatttcaaagcgcagagtgcggcgagtttccagttcacgaaatacctcaccctgcaaggttttaacttcctcaaaaggatctttaccgcgccataacgtggcaaacggctctttaagttcaaccatccagaccacccgttatgatgtccgccgctttctctggcagactgtataaatcttgtgtatcagcataatgtcgcgcattttccgcccaggcctggcgcaatgaagattgcgttaacgctttgcgtaaaatctcattcaatgtttcctggcggaatggctcagcaatagcctcgccgcaattggcgtcgacaatataatgcgcatagccacaaacggctgttgttagtaccggtaatcctgcagttatcgcttccagcagtacaattcccgcggcttcctggtaggcaggatgaagtaataaatccgccgccgccattaattccgagacatcgttgcgccccgagaagaagtgaacattactgcgcacgccgcgtttttctgccagcgcctcaaattttcgcggtttatcctgcccaacaacatatagtaatgtgttgtggcgcagcgaatccggtaacgaagcaagtgcttcaatggaacgatcgacacctttacgcgtgaagtctgaaccaacctgcaacaataaatattgttgttcggttattccattcttcttacggaagatttcacggctattggctggctgctggctatatttacgatcaggataaatccccggaggcagaatatgaaaacgctccgcttcagtctgataatgtttctggaaatcggcgatttgcttatctgtcagcatcagcagctgtgtcggcttgccctgttcgaaggttgcccgctcaaaggcggcataatggcgataacgtgacgtcaggcgatagaaaaagcctttctcctgcgctactttctcggcataacaaacatcagcggcataataaacgtccagccccggcattttattaaatccaacgactctatcgacggggtgttcacgtaaatgtttttgcacccaggcaaaatattccgcattgcgcccgtgattggtatgcgatttaaccggcactttgatcagttcaaatacatcagggcattcgccttcccacgactgggtataaacccgaacatgatgacctcgggcggcaactgtctgagcaatacgcataaaatcgcgctgcaaaccgccaaagggaaaatatttatataaacaaaaagcaacgatcataacgacgtacctgtcgtggaggagggaagtaatttatcgacagctgcaatgacatctgccgccggaataaccgaaagatacatctcatttcggtcacgctgatcgcgcgttggcatttcccggtaatctcccgcccagaattgaatcatgttatttgaccagggacgccagaaaatatggtctgtcgcaccaaacagcgatatcagcggcgtattaactgcagcggcaatatgcgccggtgcggaatcaacgccaataaacagctgcgcatgatcgattaacgcaccaagttccgggaaggtcacctttccggccagcgccgttactggtggcgtctggcatccctgcgcaatttcattgacgcaggccagatcgtctttatctgggccggacgtcagaacgacttcataaccacgagcatgtaaggcatcaatcacagcggaaaacttggcgttgtcccaacatttgaagatttgccgcgccgtaggttggataaccacataattttgtccaacaccagcgtgatcaagttcgcgacgcatacgtttccagcttgcaggcgggtaactcatggttgtctgcttcaccaacgattcaagtcccaatggcgtcagcacggataagttactttccaccacatttccaccctgcaacggcaccaaatgagtgaaactattacgccaaaaagcagactgccgatgatgataatcctgggaaattttcacacgggcatttaataagcgaaccagtatagcaaccatccattgatcggtaagattaacgataaggtcatacttattggcacgtaataccttgatgagataaaaaaagttggcaattttttctgaggcttttgcttttttattttttatgccgtagagcgcgttaatctctggattttcagacaggatcgggatggtgtcctgataaagcagcacatcgatttttgcgtcagggtaattttttttcagcgaactaatgacgggagtagttaataacatatccccatgaaaacgcatcttaatgagcaaaattcttcgaaatggcttatccacaagtaactctttttgttgagattatccgattaaggtgaagcagaaaaagcacgctaccgccccaggctcaacagctacctgaatactgataccgcactgatattgacgcgctagtgtatcacttctttcgcggcaatccgactcgaatgatttttaagcacattgttgattttcaataaagaaatcaatcaaataaaatcattagcaaccatattcttttactgttgctctgcgattccttcctgcacgtactgcagaaatcaatgaatcgcataaaaatacaaaaaaagtatagatgttcagcaagaattggcgggtaaattgctatttaagtcaaaaatgggaaaagtaatggtaaagccacagctaaatacatagaatccccagcacatccataagtcagctatttactatgctcgaattgctttacaccgcccttctctaccttattcagccgctgatctggatacggctctgggtgcgcggacgtaaggctccggcctatcgaaaacgctggggtgaacgttacggtttttaccgccatccgctaaaaccaggcggcattatgctgcactccgtctccgtcggtgaaactctggcggcgatcccgttggtgcgcgcactgcgtcatcgttatcctgatttaccgattaccgtaacaaccatgactccaaccggttcggagcgcgtacaatcggctttcgggaaggatgttcagcacgtttatctgccgtatgacctgcccgatgcactcaaccgtttcctgaataaagtcgaccctaaactggtgttgattatggaaaccgaactatggcctaacctgattgcggcgctacataaacgtaaaattccgctggtgatcgctaacgcgcgactctctgcccgctcggccgcaggttatgccaaactgggtaaattcgtccgtcgcttgctgcgtcgtattacgctgattgccgcccaaaatgaagaagatggtgctcgttttgtggcgttgggcgcaaaaaataatcaggtgaccgttaccggtagcctgaaattcgatatttctgtaacgccgcagttggctgctaaagccgtgacgctgcgccgccaatgggcaccacaccgcccggtatggattgccaccagcactcatgaaggcgaagagagtgtggtgatcgccgcacatcaggcattgttacagcaattcccgaatttattgctcatcctggtaccccgtcatccagaacgcttcccggatgcgattaaccttgtccgccaggctggactaagctatatcacacgatcttcaggggaagtcccctccaccagcacgcaggttgtggttggcgatacgatgggcgagttgatgttactgtacggcattgccgatctcgcctttgttggcggttcactggttgaacgtggtgggcataatccgctggaagcggccgcacacgctattccggtattgatggggccgcatacgtttaactttaaagacatttgcgcgcggctggagcaggcaagcgggctgattaccgttaccgatgccactacgcttgcaaaagaggtttcctctttactcaccgacgccgattaccgtagtttctatggccgtcatgccgttgaagtgctgtatcaaaaccagggcgcactacagcgtctgcttcaactgctggaaccttacctgccaccgaaaacgcattgaggttgttatgcaaaaacgggcgatttatccgggtactttcgatcccattaccaatggtcatatcgatatcgtgacgcgcgccacgcaaatgttcgatcacgttattctggcgattgccgccagccccagtaaaaaaccgatgtttaccctggaagagcgtgtggagctggcacagcaggcaaccgcgcatctggggaacgtggaagtggtcgggtttagtgatttgatggcgaacttcgcccgtaatcaacacgctacggtgctgattcgtggcctgcgtgcggtggcggattttgaatatgaaatgcagctggcgcatatgaatcgccacttaatgccggaactggaaagtgtgtttcttatgccgtcgaaagagtggtcgtttatctcttcatcgttggtgaaagaggtggcgcgccatcagggcgatgtcacccatttcctgccggagaatgtccatcaggcgctgatggcgaagttagcgtagcgtttatgccggatggtatgccatccggctcgcatcaattacttctggcactgccgacaataaaacgttgcccgctgcgcatgtttagtcgccacaatcggcgtaccgcacacccgacacggctcgccttttcgcccgtaaacctgcaattcctgcgcgaaatagcccggtttaccatcactttgcagaaaatctttcagagttgtaccaccctgctcaatcgaacgcagcaacaccgctttaatcacccgagctaacaattcacactctgccagcgacagtgatgacgccagccgatccggatggatccccgcagcaaacagagattcgctggcatagatattccctacgcctaccaccagcttgttatccatcagccatggtttaatcgccgtttttttcttctcgcacttctgatgcaggtactcaccgttgaaatcgtcgctaagcggctccggtccaagatgggccagcacgttgtgcccttccagctctttggtccacagccaggcaccaaagcggcgcggatcggtgtagcgcagcactttaccgttgctcatcaccaaatcaacatggtcatgcttttcagggggaagttcttctggaaggatgcgcaggctgccagacatccccaaatgaatgataatccagccctcaggcagctccagcagcagatatttagcccgccgctgcacgctaagcactggttggtcgcttaaacggtagatctcttctgaaaccggccagcgcaagcgtccgttgcgcaccaccgcatgaagaatggttgcaccaacgagatgcggttctatgccgcggcggctggtttcaacttcgggtaattcaggcatagcatctccaggaatgaacagatgcagtcaatatgggggcaggcagataacaaaaaaccccgccggggcgaggtttttcgttacatcaaagcaaaaattatttgattttcgcttctttgtagatcacgtgctggcgaacaactggatcgaattttttcagttccagtttttccggcttagtacgtttgttcttcgtagtggtatagaagtgaccagtaccagcagaagaaaccagcttgattttctcacgaatacctttagccatgatttatttcctctaagtacttagtacttttcgccacgggcacgcagttcagccagaactgtatcgatgccttttttatcgattacacgcatacctttagcagatacgcgcagggtgacaaaacgcttctcgctctcaacccagaaacggtgagagtgcaggttcggcaggaaacggcgtttagtcgcgttcagtgcgtgggaacggttgttaccggtcaccggacgcttgccagtaacttggcagactcgggacatgtctattctccaaaaatcaaattagctcgagcttcgtatggggtattggcgcctcgtcaggctttacagcccggtcatcgcagttctatgtgaactctcgattgccaggcccaaatgccaaacccgagattctcaaaggtggcgtagtatacgctgactcagcgatgtgctcaagtcccgaacagacaaagatcccgaaggatcgcgcatagcgggttaaatccagccgcgttcggcaaaagaaacatactctccacgcccaatcacgatatggtcgagcacgcgtaaatccatgaactgacaactctttattatccgttcagtaatgagtttatccgctttactgggttcagcacaacccgaagggtgattatgcgcaaggatcagcgccgaggcgtttatttttatcgcttcgcggataatttcccgaggatggacttcaacatggtttagcgtgccggaaaaaagacggctatgcgttataaccctgtgttgggagtcgagaaagatcaccataaagatctcccgctcctcgcccgtgagctggctttgtaaaaattccctcgtcatctccgggctgagtaaagggctttcttcacgcatccgtacgttgtagtaacgccgcgccagttcggcaatcccctttaactgggcgaatttcgccacgccaattccatgaacgccactaaattgctcatattcagaggttaacaagccataaagagagccgaaattctccagcatctcttttgccagggttaatacatctttaccgcgcgttccggtacgcagaaatagcgccagcagctcgacatccgttaaggcgctaataccaaacttcagcattttttcgcgcggcatcaacagctgtgcattgtttttcaccttcacctcctttgtggtgctcgcatcctgtcatagccgttcctttaaatcgacggccagttttcaatcctggaaagcgcctcgcaaagtgaatctcaggtgaaggcacgacaacaaaagtattgtgataaaatcgccaacttctggtgtcacccaacaggaaaaatcatcatgagcctggccggtaaaaaaatcgttctcggcgttagcggcggtattgctgcctataaaacccctgaactggtgcgtcgtttgcgcgatcgcggggccgatgtccgcgtagccatgaccgaagcggcaaaagcctttatcaccccacttagcttgcaggcggtttctggttatcccgtttccgacagtctgctggacccggcagccgaagccgctatgggccatattgagctgggtaaatgggctgatttagtgattctcgcccctgccacggcagatttaattgcccgtgttgctgccggaatggcgaatgacctggtatcgacgatttgtctggctacacctgcgcctgtagccgtgctccccgccatgaaccagcagatgtaccgtgccgccgccacgcagcataatttagaggtgcttgcctcacgtggtttgctcatctgggggccagacagcggcagtcaggcttgtggtgatatcggcccaggacgaatgctcgatccgttaactattgtggatatggcggtagcgcatttttcgcccgtcaacgacctgaaacatctgaacattatgattaccgccggtccgacgcgtgaaccgctcgatcccgtgcgttatatctctaatcacagctccggcaagatgggttttgctatcgccgccgcagcagcccgtcgtggcgcgaacgtcacgctggtatcaggtccggtttcgctaccgacgccaccgtttgttaaacgtgttgatgtaatgactgcgctggaaatggaagccgccgtgaatgcatctgtacagcagcaaaatatttttatcggttgcgccgccgtggcggattatcgcgcagctaccgtggccccagaaaaaatcaaaaagcaggccacgcagggtgatgaattaacaataaaaatggttaaaaaccccgatatcgtcgcaggcgttgccgcactaaaagaccatcgaccctacgtcgttggatttgccgccgaaacaaataatgtggaagaatacgcccggcaaaaacgtatccgtaaaaaccttgatctgatctgcgcgaacgatgtttcccagccaactcaaggatttaacagcgacaacaacgcattacaccttttctggcaggacggagataaagtcttaccgcttgagcgcaaagagctccttggccaattattactcgacgagatcgtgacccgttatgatgaaaaaaatcgacgttaagattctggacccgcgcgttgggaaggaatttccgctcccgacttatgccacctctggctctgccggacttgacctgcgtgcctgtctcgacgacgccgtagaactggctccgggtgacactacgctggttccgaccgggctggcgattcatattgccgatccttcactggcggcaatgatgctaccgcgctccggattgggacataagcacggtatcgtgcttggtaacctggtaggattgatcgattctgactatcagggccagttgatgatttccgtgtggaaccgtggtcaggacagcttcaccattcaacctggcgaacgcatcgcccagatgatttttgttccggtagtacaggctgaatttaatctggtggaagatttcgacgccaccgaccgcggtgaaggcggctttggtcactctggtcgtcagtaacacatacgcatccgaataacgtcataacatagccgcaaacatttcgtttgcggtcatagcgtgggtgccgcctggcaagtgcttattttcaggggtattttgtaacatggcagaaaaacaaactgcgaaaaggaaccgtcgcgaggaaatacttcagtctctggcgctgatgctggaatccagcgatggaagccaacgtatcacgacggcaaaactggccgcctctgtcggcgtttccgaagcggcactgtatcgccacttccccagtaagacccgcatgttcgatagcctgattgagtttatcgaagatagcctgattactcgcatcaatctgattctgaaagatgagaaggacaccacagcgcgcctgcgtctgatcgtgttgttgctcctcggttttggtgagcgtaatcctggcctgactcgcatcctcactggtcatgcgctaatgttcgaacaggatcgtctgcaagggcgcatcaaccagctgttcgagcgtattgaagcgcagttgcgtcaggtattgcgtgaaaagagaatgcgtgagggtgaaggttacaccaccgatgaaaccctgctggcaagccagttgctggcattttgtgaaggtatgctgtcacgatttgtccgcagcgagtttaaataccgcccgacggatgattttgacgcccgctggccgctaattgccgcacagttgcagtaagatgacgccggatgacttttcatccggcgagtttcgttaaacgccaaactcttcgcgataggccttaaccgccgccagatgttccgccatttctggcttctcttccaggtaagcaatcaggtctttcagggtgatgatagagatcaccttgcagttgtaatcacgctcaacttcctgaatcgccgaaatttcgccgcgcccgcgttcctgacgatcaagcgaaatcaacacgcctgcaagcgtcgcgccattggcctgaataatttccatcgactcgcgaatcgccgttccggcggtgatcacatcatctaccagcattacgcgtccttgtaacgcgctaccaaccagattaccgccttcaccgtggtcttttgcctctttgcggttaaagcagtacggcaggtcaaggtcatgatgctccgccagcgccacggcggtagtggtggcaatcgggatccctttgtaagcagggccaaacagcagatcgaactcaatgccggaatccaccaatgcttcagcgtaaaaacggcctaacagtgccagatcgcgcccggtattaaacagcccggcgttgaagaaataggggcttttgcgcccggatttcagcgtgaactcgccaaactttaacacctgcttgctaagcgcaaattcaataaactggcgctgatatggtttcatgccttcgctcctcatcttacttttctacagacaaaaaaaaggcgactcatcagtcgccttaaaaatcagtttgccagcgccgccttctgcgtcgctacaatggattcgattccccctcgggccagcgccaacaaggtgagtaactcttcgtgggtgaacggttcgccttctgccgtcccctgcacttcaatgatacgcccgtcttcggtcatcactacgttcatgtcggtctctgcggcagagtcttcaacatattccagatcgcaaaccgcttcaccgttcacaatcccgacagagaccgcggctaccatccctttcattggattagttttcagcttgccgttttccaccagcttctgtagcgcatctgccagcgccacgcaggcacccgtaatcgaagcggtacgcgtgccaccatcagcctgaagcacgtcgcagtccagcgtaatggtgaactcacccagtgctttcaaatctactgccgcgcgaagagcacgggcgatcagacgctggatttccattgtgcgtccaccctgcttacctttcgccgcttcacgcgcgttacgggtatgggtagaacgtggcagcataccgtactctgcggtgatccagccctggccctgacctttcaggaagcgcggcacgccttcttcaatagaggcggtacacaatactttggtatcgccaaattcgaccagcaccgagccttctgcatgttttgtatagttacgagtcagggtaacgggacgcacctgattattgctacggcctgctggacgcatattgaaatctccggcttgaaacaaatgtggctgcgcattatacggacttccggcggttattcctatcctgacaaggcatcgatggctataatccttccacctctccttttataaacaggaacgtctatgatccgcagtatgaccgcctacgcccggcgtgaaatcaagggtgaatgggggagcgcaacctgggaaatgcgctcggtaaaccagcgttatctggaaacttactttcgtctgccggagcagttccgtagccttgaacctgtcgttcgcgagcgtattcgttctcgcctgacgcgcggtaaagtggaatgtactctgcgctatgagccagatgttagcgcgcaaggtgagctgatcctcaacgaaaaactggctaaacagctggtaactgccgcgaactgggtaaaaatgcagagcgacgaaggagaaatcaacccggttgatattctacgctggccgggcgtgatggcagcccaggagcaagatctcgacgcgattgcagctgaaattctcgcggcgttggatggcaccctggatgactttatcatcgcgcgcgaaaccgaaggtcaggcactgaaagtgttgattgagcagcgtctggaaggcgtcaccgccgaagtggccaaagtccgcgcccatatgccggaaatcctgcaatggcagcgtgagcgtctgatagcgaagctggaagatgctcaggtgcaactggaaaacaaccgtctggagcaggagttggttctgctggcacaacgaattgacgttgccgaagaactggaccgcctcgaagcgcatgtcaaagagacctacaacattctgaagaaaaaagaagccgttggtcgtcgtctggactttatgatgcaggagttcaaccgcgagtcgaacactcttgcttcgaaatctatcaatgccgaagtgacgaattctgccatcgagctgaaagtgttgattgagcagatgcgcgagcagatccagaacattgaataactcgtaacgccaattcttccttttcagccttcacaaatgccgcccactcaaacagagcggcatttttcctccccgcaacattcaattctgttttgcgtgcctgctccagattttgcgatgtttttttgcccagcgcagtgagaacgtgagatactcacaactgtatataaacacagttgtaaacttactttccttgcaatcgatatcatatggagtgggcaatgaacgaacatcatcaaccttttgaagaaatacggcattatggcactgaagggcaagaattttggtcagcgagagaattggcaccgttactggattatcgggactggcgcaattttcaaaaggtactggcccgcgcgactcaagcgtgcgaagccagcaatcaagccgcatctgaccatttcgttgaaaccaccaaaatggttgtattaggttcaggggctcaacgagaacttgaagatgttcatctctcccgctatgcctgttacctggtagtacaaaacggcgaccctgcgaaaccggttattgcggcagggcaaacttattttgctatccagacccgacggcaggagctggctgacgatgaagctttcaggcaacttcgtgaagacgaaaagcgtctttttctgagaaatgagttgaaagaacataacaaacaattagttgaggcagcgcagcaagctggggtagcgacagctatcgatttcgccatatttcagaatcatggttaccggggactgtatggtggattagatcagaaagccatccatcagcggaaggggctgaaaaagagtcagaagatcctggatcatatgggttcaacagaactggcggctaatctctttcgagctacccaaacagaagaaaaactcaagcgggatggcgtgaattcaaaacagcaagctaataccacacactttgacgtgggtcgcaaggtgaggcaaaccattcaggaacttggcggaaccatgcctgaggagttgccgaccccgcaggtcagcatcaagcagttggaaaacagtgtaaaaattacagagaagaaatagcagaaaataaaaactctttttgttgattgagatacccgatgcgtaagccaaagtccaggtgcggtgaacacaatggctaaacattgcacctttcttttccacccctcaattttaacctattttttcttatgcattttctcagacaagaagtcagaagaatgcatctacgctacagaaaatagcgatttcacataactacaagttatcaatttcctctcaccttaaaaaatctcaatcgtgacaatacgcacaaatcgctaccctgccagacagatttttagggagagaaccatgctgttacacattttgtatttggttggcattactgccgaagccatgacgggggcgctggcggccggacgacggcgcatggatacatttggcgtaattattattgcgaccgccacggcaattggcggagggtcagtgcgcgatattctgctgggccactatccgctcggctgggtcaaacacccggaatatgtgattatcgtcgctaccgctgcagtactcaccactatagttgctcctgtaatgccttatctgcgcaaagtgtttctggtgctcgatgcgctcggactggtggtcttttctatcatcggcgcacaggttgcactggatatgggacacggcccaattattgccgttgtcgcggcggtaaccaccggcgtgtttggcggcgttttgcgcgatatgttctgtaaacgcatcccactggtattccagaaagagttgtatgcgggtgtctcatttgcctccgccgtgctgtacatcgcgctgcaacactatgtttctaaccatgatgttgtgattatctccaccctggtattcggcttttttgcccgtttactggcgctacgtcttaagctgggattaccggtcttttactacagccacgaaggtcactaaggttcaaaacctgtgatctgctgggcagacagccaactgcccagcttcttgatttgcgcattttccttccattcaataacctgtctggcgcgccccgatccagtccccggcagctgctgccagaactgttccgtgctaaataaaagttgcgaccaggaccgttcatcactggcattaagcgccgcccgggttagcggtattcccattgccatcacccagcgagtaaaaggctgctgacgagccagattaaactgatgccataactgcgcacttttacttttcgcgatccccggcgtgttctgtaattgctctggcgttaataaaagccaggaaaagatatgctcaaagcgatgagtctgatgcagggcgcgccagccggcctcaccaatgccatcaagccccagaacctgttttgaccccagccagactaagcgtgaaatgaactgttcctgacaaacatcagaagcaaagtagcaggtcaacgagttaaagcggttttctggtggtgtcggttttgtacgttctgctccgcgccagaccacatcatcaatgcgaggaatcccctgaccggcaaggctgacgaggatctgatcaccaggcgcaatatcccattcctgccagcgcctgacggaaccaatattcacccgctggatttttttatcatccagcatgacaggtgcgagtgacgccaccaccgatattttaccgctcttacccaccgcaaattgaatcgccttcacttcggcaacctgagctacaggttgatatttccaggccaccagccactccgcctggcccggtaaccaatgacgggattcgggttctttcgccgctcgcacaaccacgccatcggtgacgaagggtaattttgctttccaccactcattgcgtacgtgcgcaacctcatcagcatttttaaccgcgcgggtatacgtctgcgttaaagtaaaacctgcggtagccagatcctttaaacgatcggtcattaaatgcggtccatccggccatgcccagacaaaaacagccagtgagtttagcgtatcgctattcccctggcgcatcatcaggccagcaacttttgcgcgggcatttattccccccatttgttgttggatatgccccttacgcttgagaaatatttccccctgaagcgtgctgttggctaaaggcccgctaacggtttgcggcacagcggaaattaagcgaactttctgcgtccagtcctcgcctttcaggccattaccgcgactgattgctttgttcagtttcccgtcccgataaaccagggttaccgcaacgccatcaacttttggctgcacccaaagatcgctacgttcgcgcatccacagacttaatgcgtttttatccgccattttgcgtacacccgtatgggcaaccggatgcataaccgcaccgtttaaaggcggcatcatcacatcgcgagtctcgttcccaaaacagcgttgccactgcgtgagacgggcgcttaactgatcgtaaacaccgtcttccacctcacttttcccttccttccagtagtcatcgtcccactgttttatttgctgttgcaggcgggaaatttcttcctgtgctctggctggcgaccaggccggacagaccgcccacgccgatgattgccagcacaagatacttattaatatcgccatccatactttcatcatcacctccgctgtagatagtcaggcagatatacaacttggtgaagacaaagccgagtggcaaaaacggagtctgcgaggacgcttcctgagaatcgtctttattgcagtgaatcacaggcaaatgcggaagcagctacgcaaaatgcaacaactttgcgcaaaaagtgtgagcaagggctacgtcacatggccgcgccgtgtataataagctcgtatgtaggctttatttcgctaatcacatacgaaagatactcatggctcaaggcacgctttatattgtttctgcccccagtggcgcgggtaaatccagcctgattcaggctttattaaaaacccaaccgttgtatgacacccaggtttctgtttcacacaccacacgccaaccgcgtcctggtgaagtccacggtgaacattatttctttgttaatcatgatgaatttaaagaaatgattagtagagatgcgttcctcgaacacgcagaagtttttggtaattactatggcacttcgcgtgaggccattgagcaagtactggcgaccggtgtcgatgtttttctcgatatcgactggcagggtgcgcagcaaattcgccagaagatgccgcacgcgcggagtatctttattttaccgccgtctaaaatcgaactggaccgccgtctacgcggtcgcggtcaggacagcgaagaggtcattgcaaagcgtatggcgcaagctgttgcagaaatgagccattacgccgaatatgattacctgattgtgaatgatgacttcgataccgcgttgaccgatttgaagaccattattcgcgccgaacgtctgcgcatgagccgccaaaagcagcgtcatgacgctttaatcagcaaattgttggcagactgaacctgatttcagtatcatgcccagtcatttcttcacctgtggagctttttaagtatggcacgcgtaactgttcaggacgctgtagagaaaattggtaaccgttttgacctggtactggtcgccgcgcgtcgcgctcgtcagatgcaggtaggcggaaaggatccgctggtaccggaagaaaacgataaaaccactgtaatcgcgctgcgcgaaatcgaagaaggtctgatcaacaaccagatcctcgacgttcgcgaacgccaggaacagcaagagcaggaagccgctgaattacaagccgttaccgctattgctgaaggtcgtcgttaatcacaaagcgggtcgcccttgtatctgtttgaaagcctgaatcagctgattcaaaactacctgccggaagaccaaatcaagcgtctgcggcaggcgtatctcgttgcacgtgatgctcacgaggggcaaacacgttcaagcggtgaaccctatatcacgcatccggtggcggttgcctgcattctggccgagatgaaactcgactatgaaacgctgatggcggcgctgctgcatgatgtgattgaagatacacccgccacctaccaggacatggaacagctttttggtaaaagcgtcgccgagctggtagagggggtgtcgaaacttgataaactcaagttccgcgataagaaagaggcgcaggccgaaaactttcgcaagatgattatggcgatggtgcaggatatccgcgtcattctcatcaaacttgccgaccgtacccacaacatgcgcacgctgggctcacttcgcccggacaaacgtcgccgcatcgcccgtgaaactctcgaaatatacagcccgctggcgcaccgtttaggtatccaccacattaaaaccgaactcgaggagctgggttttgaggcgctgtatcccaaccgttatcgcgtaatcaaagaagtggtgaaagccgcgcgcggcaaccgtaaagagatgatccagaagattctttctgaaatcgaagggcgtttgcaggaagcgggaataccgtgccgcgtcagtggtcgcgaaaaacatctttattcgatttactgcaaaatggtgctcaaagagcagcgttttcactcaatcatggacatctacgctttccgcgtgatcgtcaatgattctgacacctgttatcgcgtgctgggccagatgcacagcctgtacaagccgcgtccgggccgcgtgaaagactatatcgccattccaaaagcgaacggctatcagtctttgcacacctcgatgattggcccgcacggcgtgccggttgaggtccagatccgtaccgaagatatggatcagatggcggagatgggtgttgccgcgcactgggcttataaagagcacggcgaaaccagcactaccgcgcaaatacgcgcccagcgctggatgcaaagcctgctggagctgcaacagagtgccggtagctcgtttgaatttatcgagagcgttaaatccgatctcttcccggatgagatttacgttttcacaccggaagggcgcattgtcgaactgcctgccggtgcaacgcccgtcgacttcgcttatgcggtgcataccgatatcggccatgcctgcgtgggcgcacgcgtcgaccgccagccttacccgctgtcgcagccgcttactagcggtcaaaccgttgaaatcattaccgcaccgggtgctcgcccgaatgccgcgtggctgaactttgtcgtcagctcgaaagcgcgcgccaaaattcgtcagttgctgaaaaacctcaagcgtgatgattctgtaagcctgggccgtcgtctgctcaaccatgcgttgggtggtagccgtaagctcaatgaaatcccgcaggaaaatattcagcgcgagctggaccgcatgaagctggcaacgcttgacgatctgctggcagaaatcggccttggtaacgcaatgagcgtggtggtcgcgaaaaatctgcaacatggggacgcctccattccaccggcaacccaaagtcacggacatctgcccattaaaggtgccgatggcgtgctgatcacctttgcgaaatgctgccgcccaattcctggcgacccgattatcgcccacgtcagccccggtaaaggtctggtgatccaccatgaatcctgccgtaacatccgtggctaccagaaagagccagagaagtttatggctgttgaatgggataaagagacggcgcaggaattcatcaccgaaatcaaggtggagatgttcaatcatcagggcgcgctggcaaacctgacggcggcaattaacaccacgacctcgaatattcaaagtttgaatacggaagagaaagatggtcgcgtctatagcgcctttattcgtctgaccgcccgtgaccgtgtgcatctggcgaatatcatgcgcaaaatccgcgtgatgccagacgtgattaaagtcacccgaaaccgaaattaatgttttatgaacccaacacgttatgcacgcatctgcgaaatgctcgccaggcggcagcctgatctgaccgtctgcatggagcaggtccacaaacctcataacgtttctgcgattattcgtaccgcagatgccgttggcgtacatgaagttcatgctgtctggcctggcagccggatgcgcaccatggcttcggcagctgcgggtagtaacagctgggtacaggtgaaaacgcaccgcaccattggcgatgccgtcgctcatctgaaaggccagggcatgcagattctggcaacccatctttctgataacgctgttgatttccgcgaaattgattacactcgcccgacctgtattttgatgggacaggagaaaacgggcatcacgcaggaagcgttggccctggcggatcaggatatcatcattccgatgatcggcatggtgcagtcgctgaatgtttccgttgcctcagccctcattctttacgaagcccagcgccagcggcaaaatgcgggcatgtacctgcgtgaaaacagcatgttgccggaagccgagcaacaacgcctgctgtttgaaggcggctatccggtgctggcgaaagtcgcaaaacgcaaaggtctgccctacccccacgttaatcagcaaggcgagattgaagccgatgctgactggtggtccaccatgcaggccgcagggtaagcgcgatgaaaggtcgcctgttagatgctgtcccgctcagttccctaacgggcgttggcgcagcgcttagtaacaagctggcgaaaatcaacctgcataccgtacaggatttgctcttacaccttcctctgcgctacgaagatcgcacacatctctaccccatcggtgaactactgccgggtgtttatgccacggtggaaggcgaagtgctgaactgcaatatctccttcggcggtcggcggatgatgacctgccagatcagcgacggttccggcattctcactatgcgctttttcaacttcaatgcggcaatgaaaaatagcctggcgacaggccgccgcgtgctggcctatggcgaagcaaagcgcggcaaatatggtgcggagatgatccacccggaataccgcgtacagggcgatctcagcacgccagagttacaggaaacgctcacgccggtttacccaactacggaaggcgtaaagcaggctacgctgcgtaaattaaccgaccaggcgctggatctgctcgacacatgcgccattgaagaactcctgccgccggaactgtcacaaggaatgatgacgctaccggaagcgttgcgcactttgcaccgcccgccgccgacgctacagcttagcgatctcgaaaccgggcagcatccggcacaacgccggctgattctggaagagttgctggcgcacaacctcagcatgttggcgttacgtgccggtgcacaacgttttcatgctcagccgctgagcgccaatgacgcgctgaaaaataaactcctcgccgccttaccgttcaagccaacgggcgcacaggcacgcgtagtggcggagatcgagcgcgatatggcgctggatgtgccgatgatgcgtctggtgcagggcgatgtaggttccggtaaaacgctggtcgccgccctcgccgcgttgcgtgcgattgcgcacggcaaacaggtggcattgatggcaccaaccgaattactcgccgagcagcacgccaataacttccgtaactggtttgctccgctcggtatcgaagtgggctggctcgccggtaaacagaaaggtaaagcacgactggctcagcaagaagccatcgccagcggtcaggtgcagatgattgttggtacgcacgccattttccaggaacaggtgcagtttaacggcctggcgctggtgattatcgacgaacagcatcgttttggcgtgcatcagcgtctggcgttatgggagaaaggccagcagcaaggcttccatccgcatcagttgatcatgaccgccacgcccatcccccgcacgctggcgatgactgcgtatgccgatctcgatacctcggtgatagatgagctgccgccaggccgcacgccagtgactacggtcgctattcctgatacccgccgtaccgacattattgaccgcgtgcgccacgcctgcataactgaaggtcgtcaggcatactgggtttgtacgttgattgaagagtcggaattgctggaagcgcaggcggcggaagcaacctgggaagagttgaaactggcgttgccggaactgaacgtcggcctggtacacgggcggatgaaacctgccgataaacaggcggtgatggcgtcgtttaaacaaggtgaactacacctgctggttgccactaccgttattgaagtcggtgttgatgtgcctaacgccagtctgatgattatcgaaaacccggagcgtctgggtctggcgcagttacaccagcttcgcgggcgtgtaggtcgtggtgcggtggcttctcactgcgtgctgctctacaaaacgccgctctccaaaaccgcgcaaattcggctgcaagtgctgcgcgacagcaacgacggttttgtgattgcacagaaagacttagagattcgcggaccgggtgaactgttaggtacgcgtcagacgggtaatgctgaatttaaagtggcggatttactgcgcgatcaggcgatgatcccggaagttcagcgcctggcgcgacatattcacgaacgttacccacaacaggcaaaagccctgatagaacgctggatgccagaaacagaacgctactcgaatgcgtaaaaggcggcggtgagaagaccgccgcttcatcggttaacccgtaaaaatcggcaacatcaaatacagcttaatcaccagcgcattgacgatatcgataaagaacgcaccgaccatcggcacgaccaggaacgccatgtgcgacgggccaaagcgttcagtgatcgcctgcatgttggcgattgctgttggcgttgcaccgaggccaaaaccacagtgacccgcagccagcactgccgcatcgtagtttttgcccatcatgcgccaggtaacgaagatggcatacaacgccatgaagatggtctgtaccaccagaatcgccagcatcggcaacgccagcgaagccagctcccacagtttcagccccatcagcgccatcgccaggaacaacgacaggcttacgttacccagcacggataccgcacgctcaaagacgcggtaaaagcccatcattgacagaccgttgctcagaatcacgccaacaaatagtacacagacgaaggtcggtagttcaaaagcagtaccagccaaaagttgcgcaacaattttccccactgtcaggcagatagcaatcagcgcgatagtttcaatcagcaccagcgaggtgatcatgcggcccacatccggcttttcgaacgcagtcggaacttcctggtcatccggaataccgttcggtgtggtggagtgtttcaccagatagcgcgccaccggaccgccaatcaagccgcccagcaccaaaccgaacgttgcacaggccatcgccacttctgtcgcgttggtgaagccataacgttcaatgaacaatttactccatgcagcacccgtaccgtgaccgccggaaagcgtaatagaaccggccagcagccccatcagcggatcaagccctaacaggctagccataccaatgccaatggcattttgcatcaccaacaggccaacaaccacaatcaggaaaacccccaccacacgcccaccagctcgcagactggcaaggttggcgttcaggccaatggtggcgaagaaagccagcatcaacggatcccgcagggacatatcaaagttgacttcccagcccatgctttttttcagtatcagcagcgccagcgccactaataaaccacccgcaacaggttccggtatggtgtattttttcaaaaaggagacggaatggaccaacttgcgcccgagcagcaacgtcagcgttgcggcaacaagcgttgctaaagtatcgagatgaaacatagttactcctttgtgtccgcatcactctttcatactcgtcatacttcatcgcgcatttgcagtaaggcgaaatatgacgagtatcgagtcatgctttcctggttcgaattcttagctgaaactagaaaaatggcatggattttaagcagaaaacaactaaaagttatataaaaaagtacatttatctcatttaaatatttagatgaggatgtggcaaacgtttgcttttctctttcggtcagctaaaatgcccgctttgctaccacgggattgttttcgatgtctgtttccaccctcgagtcagaaaatgcgcaaccggttgcacagactcaaaacagcgaactgatttaccgtcttgaagatcgtccgccgcttcctcaaaccctgtttgccgcctgtcagcatttgctggcgatgttcgttgcggtgatcacgccagcgctattaatctgtcaggcgctgggtttaccggcacaagacacgcaacacattattagtatgtcgctgtttgcctccggtgtggcatcgattattcaaattaaggcctggggtccggttggctccgggttgttgtctattcagggcaccagcttcaactttgttgctccgctgattatgggcggcacagcgctgaagaccggtggtgctgatgttcctaccatgatggcagctttgttcggcacgttgatgctggcaagttgtaccgagatggtgatctcccgcgttctgcatctggcgcgccgcattattacgccgctggtttctggcgttgtggtgatgattatcggcctgtcgctaattcaggttgggctgacctccattggcggcggttacgcagccatgagcgataacaccttcggcgcaccgaaaaatctgctgctggcaggcgtggtcttagccttaattatcctgcttaaccgtcaacgtaacccttacttacgcgtggcctcactggtgattgcgatggcggccggatatgcgctggcgtggtttatgggcatgttgccagaaagcaacgaaccgatgacacaagaactgattatggtgccaacgccgctctattacggtcttggcattgaatggagtctgctgctgccgctgatgctggtctttatgatcacttcgctggaaaccattggcgatatcacggcgacctctgacgtttccgaacagccggtttccggtccgctgtacatgaaacgcctgaaaggcggcgtgctggcaaacggcctgaactcgtttgtctcggcggtatttaataccttcccgaactcctgcttcgggcagaacaacggggtgatccagttaaccggtgttgccagccgctatgtcggttttgtcgtcgcgctgatgttgatcgtgctgggtctgttcccggcagtgagcggttttgtacaacacattccagaaccggttctgggcggcgcaacgcttgtaatgtttggcaccatcgccgcctccggtgtgcgtatcgtttctcgtgagccgctgaaccgccgggcgattctgattatcgcgctgtcgctggcggtcggtctgggcgtgtctcagcagccgctgattttgcagtttgcccctgaatggctgaaaaacctgctctcctccgggattgccgcgggcggtattactgccatcgtgctgaatctgattttccccccagaaaaacagtaattcactggcggcggtaagataattaccgccgcagtctcacctctttcaccattcccgccttgaggattgcgcgtaaatcgtgcataactcccttatgtgcatttcacgggatggaagaccatgaaatttattgggaagctgcttctctacattctcatcgctctgttagtggtgatcgctggcctctattttcttctgcaaacccgctggggagcagaacatatcagcgcatgggtttccgagaatagcgactatcatctggccttcggggcgatggatcaccgtttttccgcgccatctcatatcgtgctggagaacgtcacgtttggccgtgatggccagcccgcgaccctggtggcaaaaagtgtcgacattgcgctaagcagtcggcaactgaccgaaccacgccatgtcgataccatcctgctggaaaacgggacgctgaatctcaccgaccagaccgcgccgctaccgttcaaagccgatcgtctgcaactgcgtgatatggcgtttaatagcccgaatagcgaatggaaactgagcgcgcagcgggtaaatggcggcgtggttccgtggtcaccagaagccggtaaagtgctgggtacgaaggcgcagattcagtttagtgccggatcgctttcgctcaatgatgttcctgccaccaatgtactgattgaaggcagtattgataacgatcgcgttacgctgactaacctgggtgccgacatcgcccgcgggacattaaccggaaacgcgcagcgtaacgctgacggcagctggcaagtggaaaacctgcgcatggcggatatccgtctacaaagcgaaaaatcgctaaccgatttctttgcgccattacgctctgtcccgtcgttgcagattggtcgcctggaagtcatcgatgctcgtttgcaaggtccggactgggcggtgaccgacctcgatctcagcttgcgcaacatgaccttcagtaaagatgactggcagacacaggaaggcaaactgtcgatgaacgccagcgagtttattcatggctcgctgcatttatttgatccgattataaacgcagaattttccccgcagggcgtagcactgcgccagttcaccagccgctgggaagggggtatggtcagaacgtcaggaaactggcaacgcgacgggaaaacgctgatcctcgatgatgcggcaattgccggactggaatataccttgccaaaaaactggcaacagttgtggatggaaacgacacccggttggttaaacagcctgcaactgaagagatttagcgccagccgcaatctgatcattgatatcgaccctgacttcccgtggcagctcaccgcgctcgatggttacggtgccaatctgacgctggttaccgatcataaatggggcgtctggagtggctcggcgaatctgaatgccgccgccgcaacgtttaatcgtgttgatgtccgtcgtccgtcgctggcgctaactgccaacagcagcacggtgaatatcagcgaactgagtgcatttacagaaaaaggcattctggaagccaccgccagtgtttcacaaacgccacaacgtcagacccatatcagcctgaatggacgcggtgtgccggtgaatattttgcaacattggggatggcctgaattaccgttgactggcgacggcaatattcagcttaccgccagtggcgatattcaggccaatgtcccgctgaaacctacggttagcgggcaattgcatgccgtgaatgccgcaaagcagcaagtgactcaaaccatgaatgcgggcgtagtttccagtggtgaagttacgtcgacggagccggtgcagtaaaaataaggacgctagcggatatcagcgctagcgttccccgttattagcgcaaaattccatactcactgcacaataaccatttcaccggttcatcttcttctatcgccggaaaacgtcctcccggctcaagaaaataattatcgtgttggtcatcatttaccatcgagatttcccagccgagaacaaacgctttttccgcccagaagcgatgatacagacgcggcggcaggcaaatgccctgccccggctttagcaccagcgtttcaccaggtttcatggtacgccgctgaccatcaacactcacggtaatgactcgttgatcatcacagagattggcttcgttggcccaggccaactgcatgcataagtctccaccgccccgattgaggatatcttccattttgtgggtgtgaaaatgccagggagtctgctgatcttgttggatctgcaacattttctcagcatacggttttggatatgccgccgaccccagcgcgccgttgcgcatcgttagcagtgttagtcccgtttggttgaaatcaccacgaccaaaatcggtgatatcccaaccgagctgtaagtcgaccacttcttgccagttatcccgttcccgctgcagccagtcatccaccgtaaaataggcgaactctggcaaacaaacgcggaaggtctgcgcaatggcatgtgctttatcaataacataattaatttgtgaacgtttcattggcttctccgttgcgcatagcaagccaggcagcgccacgcattccgctactgtcgccgtgctgtgcttttacaatgggagtggtgaattgatcggtgaaaaccagtggagcgacttctgcgttcagatcggtgataagcagttccacattcgaaagcccgccgccgatcacaatcacgccagggtcaacaacattaacgatggttgccagcgtgcgggcaagctgttggcgaaaacgtgccacctgctgcatggcacaagcatcaccacgttgtgccagggtgacaatcgccgcagaagtgagcaagttaccagtcatctgttgatagcgttcactaaaaccgctgccggaaacaaacgactccacgcagttgtgtttgccgcaatagcaactgactgatggaccatcttcctgctccgtatagcctggcaacgtgatatgaccgcattcggcagcatttccccaggcccctataaacggtcgttgcttgatggcaatgccaccgccgcagcccgtaccaagcgtaataccaaataccacgtcataatcttgcccggcaccgtcgcaagcttctgatagcgcgaaacagttaccatcattggctatcaccaccggttgcccaagcaattgctgcaaatcagcctgtaacgcatgaccgttaatcacctgaatattcgcgtttttaatcaggccagtgagtggcgagatactgccgggtaaggcgatccctgtcagcatcggtcgttgaacgtcccgcctaatctgctcgataagcgccacaacgcatgagacaaattgttgatatgttgacttttgcgtcgggcagcggtaacggcgaatctcccagccatgcgcatccatgacaacggcggcgattttggtcccaccaatatccaaccccagatagtgcatatctcgttccttgttgcgtaaaaggcgggtcaccccgcccttctggcttagtacagtgatgctttaccgaacgaaccgaacagtttcattttgtggcgaatgacttcccgcgccgcgttaatcgcatccggatagatgacgttcgggtcccaccagctctctttagcgagaatttcacgcactttctggaaataggcgtatttcatatcgctggagatattgattttgccgacgccgagcgtaactgattcagcaatctccgcgtccgggtttgccgaaccaccgtgtagcaccagcggaatatcaatacgtccggcaatgtcgcgcaaaatgttcatttgcagcttcggctgcatcccttttggatagatgccatgcgctgtaccaatcgccacagccagtgtgtcggcacctgtacgagcaataaaatcggcggcctgcgccggatctgtgtaggtcacttgtgaaacaccaccttctaccgacgttcctgtttgtccgatggttcccagttcaccctcaaccgacacgccaaccgcgtgagcgaggcgaaccacttctgcggtcagcgccacgttttcttcatacggcagcagcgaaccgtcgatcattactgaggtaaatccgcagcgaatcgcacgcaaaacatgctctacagaggcaccatgatcgaggtgcagtacaaacgggaccggactacgctgggtaatttcgcgaacgtgagcgaaaaaggcatcgcccacaaaatcatgttcgctgggatggatggcaataatcgccggagtatttgtcgcttctgcttcatccacgactgcgcgaaggaaacagttatccgccacattaaatgcgccaatggcaaagccgtgctggcgggtaggttgcagtaattctttcatcgaaactaacatgttaaatctccagtttcagcgtgtagtccgccctgccggtgcgttattgcactggcataaaggccatgacagaaaatgaatcaggctttgccgatagagccgctcgcctgtaaatacggtgtaatcgcttcttcgaaggccagttccatagctttcagcgcgtccaccagttcaatggatatatcgtgacagagggtatgcaggagcgcggatttcccccgttcaaaaatggccgcccccacgttgatttttgctacccccagagtcgtacagagctggagctgatcgaacggcgtaccgctaccgccatgtaatgccagaggcacgctcgagcagtggaaaatctccgccagacgctgaaaatcaatagcaggtacaacaccaggcgcgtacatgccgtgcgccgtgcctaccgaaacggccagtagatcaatgcctgtctgcacgataaacggttccacatcagtgggttgcgtcatcatgtctgcattggcggcctggtcataacgcggcgcatctgccagatggcccagttcaccttccacgcagagctgcgcgctggcggcgagttccaccaccgccctggtctggcgcacgttttcctccaggggaaaagcagaagcatcaatcattaatccgctgaaaccagcacgaaacgcctgacgaatacagtccggatttttgccatgatcaagcgccagagcgaccggtactgaggcagattccgcgagcgttttaaccactgccgccgcgacgggtgcaggaaaatgcgccagatgcccctgatagagattgagaatgatcggagcgcgattcttctccgccacgcggatagctgcgtgagcactttccagattcatacagttgatcgccagcaaggcgtaatgttcatgccaggctttcatcaccatacttttcatatcggcaaacatagggcctccggttattcgagggtgaaagtgatctcttcatctttcagcttttgatcgctcagttcgtcaaactcttcgtcgcgttccgttaccggtttcttccagagtgaaagcatcacgccacaaatcaccgtgcctatacccagcgccaggcaaaacagcagaggatgggtgaacagaggcacaacaaacatgccgccatgcggaaccggactctccacgccccacaccatgattaagccgcccgcgaccgccgatgccaccacacaagatcccactactcgcagcaggtcacgcgcggcgatcggaatgactccttcagtgatcatgcagatccccatcggaaacgcggctttcagcgcctcgcgctccgcacgggtgtatttatggcgtgtcagtaagaacgaaagtgtgatgccaaacggagggatgattgagccgacaaatttcacggcttctggtccgtagacgccactgaccagcaagccatcggaaaacagcgacatggttttgttgaccggaccaccgaaatcgaaggttgccatcgcgccaagtatggcccccatcaggaagcgcgatccgccctgcatcgactcgagcaaatgaatcagtgcttcttgtaaccaggcgatgggtttaccaatcagcgtcatcattaacagcccaccgataatggtgcttaataccggcaacaccatgattggcatgagtccttgcatcgactgcggcaggcggatatagcgtttaagtagcaaaatggtgtagcccaccaggaaaccacccaacataccgccaataaatccggtatggatttgcccgcagagaaagccgacaatcaggcctgggacaaatccgggacgatcggcaatagaataggcaattgccgcgctaatcagcggcacaatcagccccattccccagccgccaatctgattaagcatccacgggattgttcctgttttttcaccaacatctgtaccgccaagaacttgccccaacgcaatacatatcccggcggccacaataaggggtatcatccacgagatgccggttaataaatgttttttaatttcctgtgaaaccggaattttattttctttcatattaagatccctccagtataaggatcatttgtttcccagtgatttttcgaccttttcaagaaattgaacgggcgatttaatgacgatctctgtctttactcgcacaatacgtttattggtgaagcgttcttctccttttattttcacatctacagcaagaatcacgacgtcagcagcagagatatctgccgcctgtaattcattttctgtaccaatggttccctgggtttcaactttaatggtatggcccagagcttttgctcctttgattaacttttcacgagcaatataggtatgagcaatacccgccgtacaggcggcaacacagacaatattcatgacatactccctgttatttagcagacatcggattgtgcatactgactaaagagatcaatgattttttgcggactcgtctcaactaacaattgttctatgatgtcatcatccgccagcgcgcccgcgacctgggaaagtaaacggatatgggtggtattttgatcttcaagacgtaccgcaaataaaataatacagcgcacgctactgccatccagcgtttcccagggaatatcctggcgggtacggccaattgccagcgtagtattaattaccgcagaagatttaccatgcgggatcgcaatatgattttcaaaaccagtcgagccttccgcttcgcgctgccagacatctttaataaaggtttcccgacaatcgatcgcaccatcttttttgagaagattagttaattcttcaatcgcctccgctttattcgttgcttgcatatctaaaataacgcgattcgtattcaggatttttgttatgtccattcgtcatacctcataaaattctgacattaaatttcaacgacccgagacgtcgcatgatgtaatttttccgtaatcaccatttcagtgacccgcttaatatcggcatcattaaaaaaagcggtaacataagcgaccggcatagtgactgtaggcaaattaatggtcgaaataatcagttcgatattgtcaggcaaaacctgtgataaattcgctgctgaaataacatcaacaatcgtccattcaggaaatgctcgcagaatacggcttttcagtagatgcgaagttccgattccggttgaacagaccagtaatacacgtttacgggcaatttgccgctccatcgcagcctgaaaatgaacggtcaggtaacccacttcatcctcgctcactgcattctcaccccaggttttaaatacctgattcaccacatattgcgtcaaccgccagacatccgctaattctgctttaatatcttccagcaatggattacggatatgaatgcgataatttagacggttaatcagcggcttaatatgcaccaataagccatcatataatgcgctgtcttcactaaaatcgcagtccacgatgtcactgaataccgtaattaaacgccaggtaatcagacgcgcttcattgctggcctgcatatgtgaaataatgctaacatctttttgtccatcaatcgccacacctgatgaaatgatatattgataaataaaccagacttcatcatcgggcaatgtatgtgcaattcgttgatctatcttatgaatcatctgactggcaacattaaagatattttcatcatattgtctggtttgatcttcttctcttgataacgcattcccgtgcgtgttgcgatacatcataataaggatgtgagtaaaaatgttaacgtaataaggttctcccaaagaccaacttaattcattttccatatccagtaacaatgactggacaaataacacctcttcttctccaaaataatggactaatgctttatagcttccgggatccagacgtgaatacacgacaccttgcggctcattatggttaataatgccgttaatcagtaatgccattgcctgtcggacttgcccttcactaccttcaatatgcgtaccacttggactgcggatcaacgataaccccaacggcgcaagccaggactcaattactctcaggtcattaacaatagaggctccgctgataaagtagcgttctgacaatttactgatcgacgtttcattcggtgtttcacttaataactgcgacgctattttaacgcgcctggcattattcattacacaatcaatctcttcacattctgccaccaacaaatgatcaagatgcagcaaatcagcaatattctccgcacttaacatcacacccgcgccagcacgcttctcaacatttattctccattgtcccagccattgctcaagtaaacgtaaatcacgttgaatggttttttccgaaacatttaaatagccggcaatcgtaacaatagtcgtatattcccttcgaggtaaaaggaatcgtaataatctgttttgtcgcgaggtaatcatttgcatttttttaccccttatcacaccatatggaagagcttcagttgccatctctgagggtaaatataaagcagaataatttcacaacaatactaaaatctgtccgtaatccggacagtgataaaacaaagcaaggcggttaagggatatttttcagcacagatcacattttcgtgatgaataatcgtgatcatgctcgcaaatacgatggaagaaatatttattaccagatgtgagattatttaccggatacgacacaaaaccattcgtatccggcattcttcaatagattacaacgtaattgtcagcgcattcccttgaggagtcaccaccagtccctgctcactttcagcctgcgaaccgccttgcagaccatttactttcacaatattgcgcaagcacagtgtccagttcttcgcctcgcccgtaccagtcacagtaatcgtgttgccagtacgtgctgcttttaaagtaaagatcaccgaaccgtcagcatcgggcacttcacagacggcttcatgcccgtcttgcagattaaagaggtggaatgccgtaccttcgtgccacgcgtaatcgggacgttgatcgttgttgcccagcgccagtagggtgctatcacgcacataaacgggcagactcaggaagctgtgctgctgtttatgccagcgactaccgtcgagttcatcgttgtgccacaggtgtgtccagcgaccttccggcaggtagaactgcacatcgcccgcttcagtgaacacaggcgcaaccatcacgttgtcgcctaacatgtattgacggtcaaggtaatcacaagccggatcgtccgggaactccatcatcatggcccgcatcatcggcgtaccccgcgcgtttgcacgtgcagcttcacgatacagatacggcatcatgcggcatttcagttgcgtgaagaagcgcaccacatcacaggactcatcatcgtaggcccacggcacacgataagatttgctgccatgtaaacggctatggctggaaagcaaaccaaacgcgcaccagcgtttgtaaacgtgcgccggagcggtattttcaaagccgccgatatcgtggctccagaagccaaaacctgaaaggccaatagacaaaccaccgcgcaggctttccgccattgattcgtagttagcgtaacagtcgccaccccagtgtaccgggaatttctgcgcaccgacggaggccgagcgggcaaacaagacggcttcttcctcaccaacggtgtccttgagcacgttccacaccagttcgttgtagatgtacgcataatggttatgcattttctgcggatcggaaccatcaaaccattgaacatcggttggaatacgttcgccaaagtcggtcttaaagcaatcaacgcccatcgcgaccagacctttcagtttgtcggcgtaccatttgcaggcatccggattggtaaagtcataaatcgccagacctggctgccatttatcccactgccacagcgaaccgtccgggcgtttgagtaaataacctttctcttgtaactctttaaagacgggggatttttgcccaatataggggttaatccagacgcagattttcagccctttcgctttcaggcggcggatcatcccttccgggtccggaaaagtcagcgggtcccactcaaaatcgcaccactggaaggctttcatccagaaacagtcaaagtggaaaacatgcagcggcagattgcgttccgccataccatcgataaagctgtttaccgtcgcttcgtcgtagttggtggtaaatgaagtggttagccacagaccgaaggaccacgcgggcggcagcgccggacggccagtaaaacgggtataacgatcaagtaccgctttcggcgtcgggccgtcgataacaaagtattcgagatattcactctcaacgctgaactgtactttggagactttctccgatcccacttcaaaagagacgcattggggatgattgaccagtaccccataaccacggttagtcatataaaacgggatatttttatacgcctgttcagtacttgtgccgccgtcccggttccaggtctctaccgtctggccattgcgcaccagggcagtaaagcgctctcccagaccgtaaactgtttcgccaacgccaagatccagccgctcaaacatataatttcgttgattattcgtgtcctgcacgtagccgttatttttcacctgactaccggtaatacgttcgccgttgcgcagaaaatccagtgaccagaactcacctttgctgacacgcgcacttaagttgccacttttaaactcagcgtaacgttctgtgttttcgatagtgaccttcacgtcctgcaaaatattgagcgggtaatgaggaccgttattcagcgccccctgaaaatgctcaatccgtacaccgacaataccttcctgtggggagaaaaagcgcagcgtaaataaaggcgtatcaagctgccaggtacgttcacgcacatcacgaggggcagcatagaccaccatttcattaccctgctgttcaacctcgaacacctgaagcgggtgaatcaaattgaggtcaggttgaatcaaccagtttccgtcgctaattttcattgccgttccttagttctgcacttcttgagaggtgaattgttgctggcaacggcgtttgccctgcgccagctgttccataacggttttcagattgtgcgtcgtgagcgagtagtagcgtttagcgataatcgcgctcagcaagtaacagatcgccggaacaatcgtgaatagcgcgataatgatgctaattgtggcgctgttctgcgctttttctgccgcatcatatccgccataagccagcatccagccgataagggcaccaccgaaggccaaccccagtttgagcacaaacagcgtgccagcaaaactgatcccggtcaggcgtttaccattacaccactcgccgtagtcgacggtatcggacatcattacccactggataggtgtcaccagttgatgcaacacaccaatcacgaagatgaagacaaacatggtgatgctggcctgcataggaacaaagaacatcgcgaggctaatcactgccagcagggcgttcgtccaccagaagatagtgactttacatttccagtcggtcagcggttttgccagtgcggagccaatcaggttacccacgcaataagtggtgagaaaagcgacaaacacttccggcgtacccaaaatccatgtgacgtaatacatcatcgccccaccgcgtacgcacaccgccaggatattgaaaattgtcaggaaaccgacaatacgccactggtcgttttgccagatatcacgtaaatcatcccgcatagacgtcgttgtaggtggtgcttcaacgcgttctttagtggtgaagaaacagaatgccagcatcataaatgccaccacggaaaggaccgcgataccgccctggaaaccgagtggtttattatcaccaccaattaaattaaccagtggcatcatcagaacagtagagagcatgcctcccgcggtcgccagcacaaaacgccaggattgcagcgagatacgctgagtcgggtcattggtgattacaccacccaatgcgcagtaagggatattgacgatggtataaagtaaggtaagtagggtgtaagtaattgctgcataaatcatttttccgttcatactgagatctggcgtgctataggccagtacacagacgatcccgaatggcagtgcgccaaacagcacccacggccgaaatttaccccagcgagagcgcgttcgatcggccaacaaccccatgcaaggatcggaaatcgcatccagtgcacgagcgaccaaaaacatggttccgacaaatccggcaggaatgccaaaaatatcggtataaaagaacatcatatataacattacgttatcgaaaataatgtggctggcggcgtctcccatgccataaccaattttctctttaacggacaacacttcactcttcatctgcttttccttgatgctataggggtgctgagaccgataacgcattttgtaaaccatccctgcgagagcgaatattccgatatctggttattaatttatgattcttgttttatgtgatcgtggtagcgttaatttcgctaatatatcattgtaaaatatgagttttatatgaactataatgctttcgtgataatacgctgcgtgtattaggcggaaaaaactgatctgggggatgtagaaactcaaggaagtagctataatgcgccccgcctccatgtagcaatcgaggcgcggaagatcgtcgtctccggtgaggcggctggacttcaaatccagttggggccgccagcggtcccgggcaggttcgactcctgtgatcttccgccaaaatgcctcttctgaactctcccgatgtcaacaaaaccccttctaatcccttatatatcaggttttctttatatcctgaggtcaaccgacttcaacccacatcaagttgtttttgggggtgcattcgggggtgccatttccctcttaaaatatcagcacccccataatggtaaaaatgtgagatataacaaggggttttaaaaacatctttgctatataaggggtgcattgggggtatcaggttggttactggcagaaatccccccaggaggatggattcatcaaaagccggaggatgtcatggcattaaccgatgttaaagtgaaaaccgcgaagccaaaagaaaagccctataagctggctgatagcggcggtatgtatctgctgattaacgctaatggttccaaatactggcgtatgaagtaccgcttcgctggtaaggaaaagatgctgtctattggcgtttaccccgatgtaacgcttgccgacgctcgtgagaaacgcagtgaagccaggaaactcctcgctgctggtggcgatccaggggaggcaaaaaaggaagaaaaaatcgcgctgcaaatgagtttgaaaaacactttcgaggccgttgctcgcgagtggcatcagtcgaaagccgatcgctggtcattacgctatcgtgatgaaatcatcgacacctttgaaaaagatatctttccctacatcggtaagcgccctattgctgaaattaaaccaatggaactactggaagcactgcgcaagatggagaaacgcggagcgctggagaaaatgcgcaaggtccgtcagcgctgtggtgaagtgttccgctatgcaattgtcactggcagagctgactataaccccgctcccgatcttgccagcgcgttagctacaccgaaaaaagtacatttccccttccttactgccaatgaacttcctcacttccttaacgatctggcgggttataccggcagtatcatcacgaagacagccactcagatcattatgttaaccggtgtacgaacacaagaactacgtttcgcacgctgggaggatatagattttgagacaaaattatgggagatcccggcagaagtgatgaagatgaagcgacctcatattgatccggaagcattgctgtttgtaaactggctctataatcattcctctgtgctgcatgaacgggcagaaatcattaaatgcgccgaatatatcaggttttctttatatcctgaggtcaaccgacttcaacccacatcaagttgtttttgggggtgcattcgggggtgccatttccctcttaaaatatcagcacccccataatggtaaaaatgtgagatataacaaggggttttaacaacatctttgctatataaggggtgcattgggggtatcaggttggttactggcagaaatccccctcaggaggatggattcatcaaaagccggaggatgtcatggcattaaccgatatcaaagtgaaaaccgcgaagccaaaagaaaagccctataagctggctgatagcggcggtatgtatctgctgattaacgctaatggttccaaatactggcgtatgaagtaccgcttcgctggtaaggaaaagatgctgtctattggcgtttaccccgatgtaacgcttgccgacgctcgtgagaaacgcagtgaagccaggaaactcctcgctgctggtggcgatccaggggaggcaaaaaaggaagaaaaaatcgcgctgcaaatgagtttgaaaaacactttcgaggccgttgctcgcgagtggcatcagtcgaaagccgatcgctggtcattacgctatcgtgatgaaatcatcgacacctttgaaaaagatatctttccctacatcggtaagcgccctattgctgaaattaaaccaatggaactactggaagcactgcgcaagatggagaaacgcggagcgctggagaaaatgcgcaaggtccgtcagcgctgtggtgaagtgttccgctatgcaattgtcactggcagagctgactataaccccgctcccgatcttgccagcgcgttagctacaccgaaaaaagtacatttccccttccttactgccaatgaacttcctcacttccttaacgatctggcgggttataccggcagtatcatcacgaagacagccactcagatcattatgttaaccggtgtacgaacacaagaactacgtttcgcacgctgggaggatatagattttgagacaaaattatgggagatcccggcagaagtgatgaagatgaagcgacctcatattgatccggaagcattgctgtttgtaaactggctctataatcattcctctgtgctgcatgaacgggcagaaatcattaaatgcgccgaaatgctgatgcaggaagatgatttcgaaatatgcgaaagtattttaagacagcaggagaagttgcgtgaaagaattgatgagacgctttctgagaaaattgtacagaaatgcagaaatatgaatggtgaatatatctggccctggatattgccgttttcagcggcaggcatgaaacatactggcatacagtatcagtagatattgcattagtgtatcctgcacacaagtaataatttattcaccaataataacactgttaatgcccccttcccctggttgtcagccaggggttatcttctgaatatttcttttgaaaaggataacacagtaaattatttttatgaattatcccatggactcattaacaccctttcatgatgctttattgtcaaacacgttatggctgacatcaaaaaaaaccggatttcctctgccagcgggtaatcaccttcccggtgttttcggttggtctggttactcctgtctggttattagcaagataattgctataaacagtggaaaactcatcgtacataatctggtgatgaacattacgcttattttcccttgaccggaagaatcagaggctgtggtttcagtccgtwggtaatgactccaacttactgatagtgttttatgttcagataatgcccgatgaccttgtcatgcagctccaccgattttgagaacgacagtaacttccgtcccagccttgccagatgttgtctcagattatgtcgctcaatgcgctgagtgtaacgcttgctgataacgtgcagctttctcttcaggcgtgattcatacagcggccagccatccgtcctataccacgacctcaaaggccgacagcaggctcagaagacgctccagtgtggccagagtgcgttcaccgaagacgtgcgccacaaccgtcctccgtatcctgtcatacgcgtaaaacagccagcgctgacgtgatttagcaccgacgtagccccactgttcgtccatttcagcgcagacaatcacatcactgcccggytgtatgcgcgaggttaccgactrcggcctgagttttttaagtgacgtaaaaccgtgttgaggccaacgcccataatgcgtgcactggcgcgacatccgacgccattcatggccatatcaatgattttctggtgcgtaccgggctgagaggcggtgtaagtgaactgtagttgccatgttttacggcaatgagagcagagatagcgctgatgtccggcagtgcttttgccgttacgcaccacgccttcagtagcggagcaggaaggacatctgatggaaatggaagccacgcaagcaccttaaaatcaccatcatacactaaatcagtaagttggcagcattaccgtggccagagtgcgttcaccgaagacgtgcgccacaaccgtcctccgtatcctgtcatacgcgtaaaacagccagcgctgacgtgatttagcaccgacgtagccccactgttcgtccatttcagcgcagacaatcacatcactgcccggytgtatgcgcgaggttaccgactrcggcctgagttttttaagtgacgtaaaaccgtgttgaggccaacgcccataatgcgtgcactggcgcgacatccgacgccattcatggccatatcaatgattttctggtgcgtaccgggytgagaggcggtgtaagtgaactgyagttgccatgttttacggcartgagagcagagatagcgctgatgtccggcagtgcttttgccgttacgcaccacgccttcagtagcggagcaggaaggacatctgatggaaatggaagccacgcaagcaccttaaaatcaccatcatacactaaatcagtaagttggcagcattaccgaattgaagtggtttactgaatttggccacctgaacagaggtgatatgctcacctcagaacaacacaggtgctccaatgaaaaaaagaaatttyagcgcagagtttaaacgcgaatccgctcaactggtygttgaccagamatacacsgtggcagatgccgccaaagctatggatgttggcctttccacaatgacaagatgggtcaaacaactgcgtgatgagcgtcagggcaaaacaccaaaagcctctccgataacaccagaacaaatcgaaatacgtaagctgaggaaaaagctacaacgcattgaaatggagaatgaaatattaaaaaaggctactgtagattcaatctgtcaatgcaacacccctttcaattatctctttcggtgttttgaacttcagtgtctttctcggtctgttgtttagctgagcagcaaccagatctagttcatgttgagtatattgggcaagacatgtctttttaggaaagtactgccgaattagcccatttgtgttctcatttgttccccgctgccaaggactctgaggatcgcagaagtaaactttaacgccggtgctgacagtaaattctagatgtctggccagttccattcctctgtcccatgtcagtgattttctgagttctgacggtaaactcaggaatttgtcggtaagagcctgatttactgagacagaatctttgcccctgagtctaaggatgatcgtataacgtgattttcggtctacaagtgtggctatatgagagttttttgtacctgagactaaatcgccctcccaatgccccagagagcgtctgttatcgatatttcgggaacgttcgtgaattggtgttccgttcactatgttaatcgtacctctttcgcctttgcgggtatgacgcctgccatggcgaaggctatgcgaccgtcgcagatgctgtatattcaggtggtgtagcgcttcacggctacgaaagtacagcgttttataaattgtctcaggtgatattcgcagcgttttttgacgtggttttgttcgccttaaccatcctgatatttgctctggagaccatttcatctccagcttttccagaacaagctttcgcaatggtaaattttgatccagtaagcacggttttggccttttcgccattctgttggctcggttattagcatcaacagctttgtaatagcgtctgccccgattacgctgaacttcacgtgagatcgtcgaaggactgcgattcagcgcagtagctatcgcacgaatgctcattttggctgacaaaccagctcgtatctcctcgcgctcagacagtgtcaggtgagctacagcccgcttacgctcatggggttttatgccgccagtatcccttaacatagtgaagatcgttccgggttttgaacccaggatattcgctatttcactgaagcctgttccgttcttccatagttcaaaaacagaggctttttcctctgctgtaaatgttcgtctcattcaaaaaacctccgcaaccccatgttttcacataactgttgcgttgaccaattgaatctacagctagactggccccctgaatctccagacaaccaatatcacttaaataagtgatagtcttaatactagtttttagactagtcattggagaacagatgattgatgtcttagggccggagaaacgcagacggcgtactacacaggaaaagatcgctatcgttcagcagagctttgaaccgggaatgacggtctcccttgttgcccggcaacatggtgtggcagccagccagytatttctctggcgtaagcaataccaggagggaagtcttactgctgtggctgccggagaacaggtcgttcctgcctctgaacttgctgccgccatgaagcagattaaagaactccagcgtctggttagactggccccctgaatctccagacaaccaatatcacttaaataagtgatagtcttaatactagtttttagactagtcattggagaacagatgattgatgtcttagggccggagaaacgcagacggcgtactacacaggaaaagatcgctatcgttcagcagagctttgaaccgggaatgacggtctcccttgttgcccggcaacatggtgtggcagccagccagctatttctctggcgtaagcaataccaggagggaagtcttactgctgtggctgccggagaacaggtcgttcctgcctctgaacttgctgccgccatgaagcagattaaagaactccagcgtctgcttttattgcccgaaggccctttctcacgcgaacaggctgttgccgtcaaaacagcttaccgcaatgtgtttactgaagatgaccagggaacgcatttccggctggttatccgtaatgctgaagagaccggcatacttcccgcagtaaacgatatgcgtacattcccaccatcaccgtactggaaagcctgcagcgggaaggctttcagccattcttcgcctgccagacccgtgtgcgcgcggggaaatgtggtggacagagtcattgaaggggcttacgaggtggtgggcgtgtttgaccggattgaggaaaagcgtgatgccatgcagtcgctggtcctgccgccaccgacacgccaggcgctggcacaggcggcactgacttaccgttatggtgacgaacatcacattctgacgccacgacgccgggaggattacggtaaggacctgtggagtgcttatcaaactggtagccactcccgtccctgatgaacggcgcatcagcttctggccgcagcactttggcctcattccacagtgggtgaccctggagccccgtatcttcggctggatggaccgtctgtgtgaagactactgcggtggtatctggaatctgtacaccctgaacaacggcggggcatttatggcacccgaaccggatgatgggtactgttcaatgccatgaacggtaaccgcgctgaaatgagcccggaagccgccggcattgctgcctgtctgatgacgtacagtcatcatgcctgtcgtacggagtgttatgccatgacggtccattattaccggctgcgggattacgccctgcagcatccggaatgcagcgccattatgcgcatcattgactgaaaggggccggaacaatgcaacagctttcctttctgcccggagagatgacgcccggcgagcgcagcctcattcaacgggccctgaaaaccctggaccgccatcttcatgaacccggcgtggccttcacctccacgcatgcggcacgagaatggctgattctgaacatggcgggactggagcgtgaagagttccgggtgctgtatctgaacaaccagaatcagctgattgccggtgaaaccctcttcaccggcaccatcaaccgcacggaagtccatccccgggaagtgattaaacgcgccctgtatcacaatgccgctgctgtggtgctggcacacaatcacccgtccggtgaagtcacacccagcaaggcagaccgccttatcacggaacgtctggtacaggcactggccctggtggatatccgggtgccggaccatctgatagtcggtggcaaccaggttttctcttttatcttctgtcttcagaggtatcccatcatgaaaattatcacccgtggcgaagccatgcgtattcaccgtcagcatccggcatcccgtctttttccgttctgtaccggcaaataccgctggcacggcagtgctgaagcgtataccggtcgtgaagtgcaggatattcctgcattaccttgcagaccgtgccggtatcagaggccggttcagagatgcggattcgtaccacctggaccaggcctttccgctgctgatgaaacaactggagctcatgctcaccagtggtgaactcagcccccgcyatcagcataccgtsacrctgtatgcgaargggctgacctgtgaagccgacaccctcggctcctgtggttacgtttatctggctgtttatccgacacctgaaacaaaaacgtaaaccaccaagataaccttctgctccggcctggtgttttcaccacgccactgtcccattttttatctctgcatatcaggaaaatcttcagtatgaaaacattacccgacacgcatgtacgggaggtatcgtgctgcccgtctccagtcaccatctggcagacactgctcacccgactgctggaccagcactacggccttacgctgaatgacacaccgttcgctgatgaacgtgtgattgagcagcatattgaggcaggcatttcactgtgtgatgcagtgaactttctcgtggaaaaatacgcactggtacgtaccgaccagcctccgggctcgccgggcaacaggcctgatgaccagccacaactacagaacggtaaataacattaccctggggaagcatccggaggcgaaacgatgaaactggccctgacgctggaagccgacagcgttaacgtgcaggcgctgaacatggggcgcattgtcgttgacatcgatggtgttaatctcgctgaactgattaacatggtcaaccacggaaacagcgctggatatcctcattacgtggctgcaggacaatatcgactgcgaatcgggaattatcttcgacaacgatgaggataaaacagattcggcagcactgttgccctgtatcgcacaggccagggaggatgtccgtactctactcaccagacttcattccactgacgccagcctgaacagggctggcgttttcgtttataaaccaaaaggaaaaacgatgatgtcagatatcacaatctcccgcccggaactggtcaacggacatacggacgttatctgctcaaccagtatccgccacattctggctgtacgaaagagtgcgctgctgcaaatcgacacacttatccggcaactggcagaaatctcagtactgacagaaagtattggaggtaaaaccgccctggactgggcgatgaaacaggattttcgctgcggctgctggctcatggagaaaccggaaaccgcaatgaaagccatcacccgcaatctcgatcgcgaaatctggcgtgacctgatgcaacattccgggatgctgtcattaatggatgcgcaggcccatgatacatggtaccgctcactggagtacgataattttccggaaatcacgtttgaacaactgcaccagaataaggatgacgtgtttgagcgaggtgtgatcaacctcttcaggggactgagctggaattacaaaaccaattgcccctgtaaatttggcaataaaattatcgtcaacaatctggtgagatgggaccgatggggattgcatcttatcaccgggcaacagactgatcgactcgtcgacctggaaagaatgctgcatctgttcagcggcaaaccgatccccgacagccgggaaaatatcactattcggctggatgatcacatccgctccgttcagggcaaagcgtgctatgaagatgagatgttcagcatcagatactttaagaagggctccgcacacatcacgttcaggaaaccagaactggttgacaggctaaatgatattattgcaaagtttgccgctctcagaacaggttattacgctgtttaaacagcttgaaccgatatcaaaacatcatccgctggtctttatcggcagaaacgatccccgcaagcctatcagtaaggaaagtgttaatcaggttatcgaattactgggatataaaggcaggctgacggggcacggtttccgccacacgatgagtactattctgcatgaaaaaggctttaactcagcgtggattgaaacgcagcttgcacacgtcgataagaacgcgattcgcgggacgtataaccatgcacagtatcttgatgggcgtagggagatgatgcagtggtatgcggattatattggttccctgacaagagagaatgttatccatggggattttaagaacacaatctagcagtcaaagatattggaaactctgcctaatgaactggctaaaaatctcaaaacccctgaggatctcagccagttcgatcacctgctgcaaaattagcgttgaggctgctctcaactgaaatgactgtaatgctccagtgagggcgcattacccatgacgcccaaaaatcgtcttctcgttctaggcctctgcgtcctgctactttatgaaatggtcgtaagccgctttaactccactagggatactagctggatcaattaaagcgagtgtagctttaaatctcgcacggcatgacggtaatgcgtttacacggcgcccaagactattgtcattgttgcttgccaaacgaatcattgttgcaatttcccttggagaaaagttacgaattaattgttcgtagcttgtagctgcagcccaacaaacaccgtaaccattgccaatattgcagcagacaactacctgaacgaattgctcttgtgcagtttccggtaccgctccgtgtagcgacagttctaataaccgttctgcaaatggtggctcgttgtagaaattatttgttccgttatgcacattccaaagtcgctcaattgctcggtagaagacagcatgttgctcagactcgtttagcagcgtcaaaagaccaagtttctcgaaaaattggagagatgccgcatgacgtggctcgtctccttttgctgcatactcgctatgtttgttgacaagatctgagcgaagagatgcagtaaaaatttcttttagtgagctgcctatatccaatgcgttcaaacgcgacggttctgatgtatttggatcgcaatagataccatgcaccattccaaccagcatctgacgctgagcatcgtgtgtatctacaagtctttgcacccacacatcatgttgattcgcattaaatctaggacctttgactgccgagataaatgccccaatgtctacccctttcggagaggatgcatcagctagagcataacgaacgcatcggtttaagaacgttgtaaattctcgatcatttacgctgcccattgtcggatgggcagccgaaaagttattgcgaacttcacgacattgatcaagaaaaaagaacccatcttcgttaactaggtttagcttgagtgcaagttcaagaagtcggctatcctgaagctccaatagatgcttttcttcaaagtccgattgcagaatctgcgcgacaatgggtaggccaaaattccgtatttttgttcttagctgaaggatagcggcattccatgcgtagttcattgccccatcaaataggccagtgctgacagcaacacacattctggcgaccagttcaccacgaagatctggtggaatttcacgcagttcacggggaaggtcgcgccatgcatactgaatttcctcgtctcttgccaaaacatgacgggggatacccaatgatgcagtaagttcggaaatggcaggcagaatagttgtaggtaatgcaggaagtactggctctggcaattttggtacgagatctgacaattttagactcctttcgctttggttgtgatactcaatttagatcaaagaaatctcagaataagatctaaggtacgtaattgtctgtggtttgactacccctttgcattttacttgtcagtgccagccgttttcaaagtaatctaccatagccaacaaaatctgaccgtaaccgtttagggagcctcatctgaacagtaactctatggtatgtttcgaatccgttggttgaactcgtagatctaacctgattgtgttctatccgataagattagagctaatacatatcaaatatagccgtcataattgacggcctatttttattcagataaaggatctactttgttttctctaataagatttcgtaaagcagtgcgtgcagcagcggtctctgtcattccgttaagatctacgctggattgcccacctcttattccaaaaactgtaaccataccatcctcatagaaatactcggcctcatacagaagaccatctttctctacttgtatatatggcataactccctcctttgtaaggaattaaaacataaaattatctatagtaacccctgacgaccaattttagggttgttagtaaaaattgtcgtagtaatcttttcgctcatgttttcaggaggatgaggattttcaatcactattatttgactattattagtatgatacttagaaagatattcatagaatttttctttaagatcagttccttgtaaagcaacatcatcttcaccttctggtttataataggcgaggagaggtgaatctaaaacaaggaaaccggggtgaggtaactcctcctcctgacaaaactctagtaatgcgacactaactgctgcatgtgtaatagctcgtagtccctttcctcgactacctctgggcttaccatctatcacaaagtctgaagcaactttgtcgaaaaatacgttgcattcaccagggaaattccatgcttttagtatggaggaaattttcaatgaaaggttatgcattacagaatcagagggaccaatttccaactgagttttctcatgtacaatacaacttttattcaataaatcggcttttcttttttccagccgttcccttcttataaataaatcaacagacctttgaatttcagattttttatcaactaatgctgtataagcatggctaaaattatcaacttttggagcaactatatctcgaattgttttatctaaatgctgataagtttcctcacattttgagtattctttttttagatgttgctcttcaccacgaagatccgatactgtattatttagctcactcaacaacgtttcaattttaactatctcggctgtagctgagtttataatagaattaacgtccccatcacatattttttccagatcttgatgatctggactagctccacaatgaggacaaggtactgcttcaatatgcataaaaatcaacccactttcctgaattgatttgagacgatcaatgtctactacataatgctcatatagtagagtgaacctggctaatagttcagagatttcatctaaccgcttctggatgttatttttagattcataatattttcccctttccaataacaggttattaagctcatcttgttgagaagcaagaaaattacgctgtagcataattgtctgctcaagacggctaaactgcgataatatatcgctgcgaactatacccaaatcatcaatttcattatttagctcaataataaactcatctattaatacaatctgtgctgaagtgtcagtattagtatctttaatgttttttattgaagcatcatctacacctgtaagcaaaagctttaaggttgctaactcagaggttttatttgtaggattatcggataaaaaaggcgagcctttcttttgtatttcaccttcctgaatcagtgctaatctggctaaatctcgaaaacttaaccctcgagttgttgccttatcacgacttttcaatatctttttattaaataacccaagctgctcaagcataaagcctgacagattatctctttttccttggacgtgcttttgtttaagaggtacgtcttttaaattatggtcatccaaatcagttagagtaaattttccaccagcaactgcacgatgaagacgccaacgttttccagcattactaactaaatagagttcaatctccgtgtaggtggatagttctacaatttcccgtaacttctttcctcccaacatgaaatcaagagattccgcaataaaagacttgcctgtatctgaagcaccgcaaatcgagttgaccccttcagaaaaagacaaaactgattctttattttgcccccgaaatacaagcttgcgaatttgtaaataattttcagccataattatcctccagatgactgaatattttggaactgactcgaccattgttgaaagaatcgatgtgtaatgttccgtatttcctgaattgttaaatcattaaattgtataaccgcccactctgcacatctttttaatctacatgaatattcagttgtaagagatgccataaaaggagctgcaacctcccccgcctgatatctaaatccatcccttgctgcaactctttgcactaatcccctgctaatcatgagcagtaatcctttttcaatcaaaccatgccttactagtaattcacctgcacgcataggtagaggtgcatgtaggcttgccgggccattaacatcgcctgaatgaacaacgaggtaatccatttcaacgagccgttgtaagtcataggcttcaggaaatgccgcaactaaaatcgcaagtgaacgtacaccagcttcaaaaggactattgaatggctctgtatgtaaattatgtttcattattaggaacccaattcaaacgatcatcgttagccaattggtgacaaataccttgacgatcttgagttttaaaagacgatactaaagggttagatgttaccgcgatgatggttgcttgcttgattgttgctttcatcctttcaaatccactgtcatggaaatcttcacatacatcaataactccatgaaaaatttcatcctgtaattgatcaaatgttcccgcaggaactgtatctcgcgcaaaatttttcagtgactcggcatggtaaaaacgctcacgctgacgtaggtagtctcttttaaactggttatgtgaatctaagaaagtagaatcaggaaaatgggtacctaaatgatctccataagcatcaaggagttgacgtagatagcgactctcattatcggctggtttatctggcggcaaatctggattcggacgacacggcaatccaccaccaaatcggactgagtgaaaaactgtttttgagtgtacttcaataagttcaactaatgattttgaagagaatatagtgaaatcaaacatatcaaagtaggtttttaactcaccagtcaatgggacatctatgacagatgaaattttgtcttggcaatttttaccccaattttcagctaatttttcttttaattcagtgggcttatttagcaactgctcaagacttgttccgattccctgagaacagacaaaaaaatgtttacgtggcggcaaatattcgcctagaaatgaatagtaaatgatcttacccatctcaacccaaacctccccgggcctgagaggatgatcatatcgtttgcattgataattgtcccataccgcttcaaaaccgttttttgaacaaaaaccagcgatatcaataccaagatcccctgaaccaccaaaacgtctaacggttatatattcatttttaagataactagcccattcttcagtgaactcctcccattcagcagggctgaaagattgaactcgtactgacttaggaatgggtagcccatcctgtatatgcatagttgatggaaccccaccggcccatttagggtgtatatctcttagatcactttctaaaatcatctgacatccctcataggtactatcatatcgctttatttgctgatcattttttaaccaattgattaattagctatttatgattataccgtgctttttgtcgctaccctagctgaaagaaaatctcatcatagctgatcgtttttaggttgtttaaccaacctaatcacgagttatacgttcattgctcgataaaaattttcataagcaaattattcctatgaaacagagctcctctgttcggcattagggaatctgacaggacgtgtcgtgatgttgaagatggcactctcaaacaagaaataatattattaacttcaattagttaaatgtatttaattatttcatcatttttccattcatctcaatttagtacgacataacgtgtcgtacctgtacggcataatctcccgtatcaacaccatgatattttgggagaacaggactgtccccactatgaaaacacagcatgatcatcatgaccgcctgtctgtcaggctatcagtcattatcagccgcttactggctggtgaatctctggagcttaaagtattagctgatgaatttggtgtctcagaacgcaccctacagcgggattttcagcaacgcctgatccatctggatcttgagcatcgcagcggaagttaccgacttatccgccaaacaggccgggagcacttacccaatacatttgcgtttatacgtaattcaggaatttcaggaatcattccggctcaaaaccgcaagttgatccggttgattgccagcaattccggcgtatcgccgtgtcttattgggcatggggcattatcttctcccgtcacgcagactgcctgttttctgaaactggcggaagctatccgcgactaccgcgccgttacattattggttaacggtaaaagctacgaagcagtagctccccgccgtctgatatttcagtccaaaaactggtttcttgttgctacccgcaccagaaatttacaggtgtttcggatggaagacgttaacgccgtaaccgttctggatacctctttccgcagaaagcctgaacttgatgctctgactgccagtgaagagtttatttcagccctccctcactttcgtttcataagtgacgtaattcagaccttcagagagtaacagacaacgtttatttcaaattaaaaaaggagacctcgtatggatgacccggtaaagggcgaaggccggatgattactgatgccagtggcgtcaccagaagggaaggcgggattttgggaatgtggagcaatatatttccagaacgtaatggtagcaacgagcaaaaaggtgatagcacaccgcgcatacccgacatcagggatattcttgatattttccctcagccactgcgggaaaagctgttgaacaaaatcagtgaagccatcgactatgaacccgtgattggtgtcatgggaaaaactggcgcggggaaaagcagcgtatgtaatgcgctgtttaaaggggaggtttgtgcagttagcgacgttgaggcatgtactcgtgaagttcaggaattgcatatacgcttcggaaaacattcgctgaagataattgatatacctggtgtcggtgagaatgcccggcgggataaggagtatgaagatttataccgcaatttgcttccctccctggatctcatcctgtgggtaataaaaggtgacgatcgggccttttctgcggatgagcatttctacaacaatgttctgctccctgctggtgggggtgagcgcgttttattcgtccttaaccaggttgataaaattgagccattccgcgagtgggatactcatctgcatcagccatctcctgcacagcgcatcaacatcgaaaagaaagaagcctacattactgaacgatttggttttacgcactatccggtgacacctgtctccgccgatgagggctacaacattcttcgtctggtagagactattattcgggctttgcctgatcgggctaaaagtagcacggcttcgcagtttaaggatgagttcaaaaccgaagaggtcaagacggaagcaaaaaacggcttcggcagcgtaatctccgggatactcgacgacgttattgattcttttccgttaccaaagcctgtcaaagagcttacccgtaagggtaaagacaaacttatcgagtgggctggtaatgcctgggaccatttttttggatagggaagtgcttaatgaaactaatcattatacctgcattgtttgtatctttatttgcattccaccctgcttatgcagtcggggcctatgacctgcaatgtatgcttgataacggcgagcaaatgacactcagccacgtcagcaataccgtttatatcagttttgaaaatcctggcggtgactccgaagagagcggctctgttattaaactggatattccttccggcgaagcgaaacagattctggcggctaatccgggagcaggaaccgcttctttcacattacgtggagaaaatgaagatatcgaaggcgcggttgcagtcaattactcagaatatgatggtacaggtgatgcttattacactgtcatgaatgcaatggggcaggaaaccagcacagtatcatgcaagccgggtaccattaaggtttccagaagcctccttcagaatggcattaatggcgttggtagccagcaggctaataaacctgatccctctcagcaacagcaggcacagcaatctacgacaccaccgtttaaagttcagttcggcagctccgtcagcaatgaaggctggaataccaaatatggtgttattcagctcactatcactgatgacaacgtggtgctgaaatccattcgggtaaacagagggaactgtaaaatggagagcgtcggtaacagaaccctgccagccaaatataaattcggtgatgtggctacgttcaaatatatgaagtgtgaccgtatcattgaagctgatattgtgaccgatacggggagctggacatttaattcctaattttacctgtagcagcatccggggaattcctgctaaataaggaggctattccccggttaattatttttcgacaacgttaaacgaaatgtatttcatccgggtataatgaagttacgcgtcgatagatgcaccgcaacggtcctgtcaggcgctcactgatatagcgttacgggtaaagcgtgtagagatagtgtcaggggattaatagcgggattcttcaatacgttccgtcagccagcgtttaacttcactttcccgccagcgggaactacgccccagtttgataggctttggaaacttgccttcactaatcagtttataaaaccatttgtcagtcaggccagtaaacgtggtaataaatgccatcgtcaccagtttgtcattcatcaggtcagtatcggtattcagttgattgctcatgacgattgtccttctgtctttacgttgataaaagacaggagcagcaacactaacccgttgatttaagatgatgttgcatactccgccattacaatcacttctccggtaataaattacttatccctgactacaaccaaagttacgttcaccgtcatcgtggtttttggtgtactccttcgccagataactgatgtgatatatgtagctgcggaaaaagtccgtatttgtgccatttctgcgatcaagttcataagagacgcccggtaaatgaaaggggactttatttgccatatctccggtacgcctaagcgccacagcccatgcccgcgccaccattcccaccagcaatccgcgaggttgcgctgaattctccgtattcagcatggtgtttctgaatacttcccgattaaccagcaacagcatgtgataatgcttgttgccattcagttcaccaaattctcttacccatgcatatcgcagcttacagggataaacacgtttaccgtctctcctgcgccgttgtaaatatgcggctatctgcgctttcagtgaggctataaaacgggtaataaccgctgagtcataccctttatggctattatccactggcagtaataaatccactctgaaagccagtattctggcgtaatcatccatcgcataacgggtaatctcttccagacgtttcatatagtgtgcattaggcttgccatatcgttcattcagtttcatgcttcagttccttgtggttggttacatatccataagtgctgtagtaacttttcactgagctatgccgatctggattactttgccctgtctctggtgtcatccctctatatgctgaatctaatgaatgagtgataaacataatattaataccggcaatgttgattcataaagaaagggtgataaaaagagtagaagcccggtatttactggtgttcgtagttaattatctgttcctgaagataaagaatttcactcttaagttataattaatacattgacctaatctatgggttgcagtcatgaatgacatcttccagatgtcaactcgttatcctgggaggtttcacccgtaaagccaccagggctatacgtggaaaaatttaagactatccagccgttttctacaggcgggatctgtgagtatggtgataaataaaaaactacgttaatggtactctattactatggaataacacgatattgctacgtgttttccacttttattgatttattgctacggttttacttcgaaaacacatcataatcacgctattgatttcgaatgatttaacaaggatgacgaggtagaacaatggccgttaatgtgcgctcatcaatagcagtgaaggatatccgaaccagcaggttcctcttctggtacatcaggaaaaacattcagggagcaaatcaattcgcgtttgatgggaacaatccagatacatccctttcggagagaattattaatacagccctcgaggccgggtatcccgatcccattcagcggggcaattttattcgctcactggaactggcgattaatacgacgcttctgccggagaaatattttagttggttaaaagaaaatgaaagagcgacgttctggctatggggcgtgatgtgtcttgattaccgctgtatggagtcaattaacgaaaagttgggcacaaatttaaacattaactggtatcagaaagccggaataacagattctcctgcaagccatagcgaaagatactcaatcatcgttgcattactggactatattaatattgagactaatcaggcaccattgatgagacagtggctatatgagaggcttgtattctggagggcaaatgaacatcagagaataaaattacgctggcttactgaggataatagtgaagtctgtacatgggcttataattacgttaataaattccagaaagagcacggcggtaatacaggaaaccatttagaccccgttcagattccggaaccactgaatagtgtagaaacctatcatgccatttatgccatgctggatttatggtcagcggatgatgacctccagcagaaagcggtaaagaaaataaataaagcgttttaccaaaaaaacttcagacgtaaactttctgaaaaacgggaacgggagtctatcagtgatacgcataaagaacgtctgtattttctggttaaattttacaagtcagataaaatatctgttattgaaaggctaatagacgaaagggttcagggaatagaaacaagattatcccgtggttgaggtgtcatttcaaacttaaattctcccggtgataatcaccgggagaattcagatatgtattatttcagcactatatcacgctcatatatgtactgccggaatgtaatttaatatctgctcgcacctattattttatcccacctatactaccgtccgttttaatcacggattaaattagccgcaattttccagaagatgcggcctgttttttatattctttattaaggaatttaccatgaaattagccagccgctttggtcgcgtaaatcaaatccgtcgcgatcgcccattaacgcatgacgaattgatgcagtatgtccccagcgtattcggggaaaataagcacgaatcacgcagcgaacgctatacctatattcccaccattaccctgctcgataacctccagcgtgaaggatttcatcctttctttgcctgccagacccgcgttcgtgatgtgggtaaacgtgagcatacaaaacacatgctgcgtctgcgccgggaagaccagatcaatcacaaccaggtgccggaaattattctgctcaacagcccggttccagttcttatcagatgctgccagggctgttccgttctgtttgttgtaacgggctggtctgcggcgagtcgtttggtgaagtacgggtaccgcataaaggcaatgtggtggagaaagtgattgaaggcgcttatgaagtcctcagtgtttttgaccaggttgaagagaaacgcgatgccatgcagtcgctgatgctgcctccccctgcgcaacaggcgctggcaaaggcggcgctgacttaccgctttggcgaagagcaccagccggtgacggaatcccagttactggctccccgccgctggcaggatgaatccggtgatctgtggacgacctaccagcgaattcaggagaacctgatcaaaggcggtttaaacgggcggacggcaaaaggtggtcgcacgcacacccgcgccattcaaggcatcgacggcgatatcaaactcaaccgcgccctgtgggtgatggctgaaaacatgttgcaactggcctcataaacaacgctattaatggtaaaggaaacacgatgtctgaactgatgctaacaccggtattttcggtgagtgaacaacgcgttatccgccgtgcgatgcgtctgctggagaaatatcaacgcaatcctggcgaatcttttctttcctctgacgccacaaaaacctggctgcaactgcatctggcacgacaggagcgggaaatgtttgttgtgctttacctcgataaccagaaccgactgctggaacacgaaacgctatttctcggcacgattaacagtacagaagtacatccccgtgagattgtgaaatctgcgctacggcacaatgccgcagcagtaatccttgcgcataaccatccctccggcgtggcggaacccagtcgggccgacagacttattacaacgaatattgttaagacactggatttggtgaaagtgagggtgctggatcatttcattattggggcgggggatgtcctctcttttgccgaacggggctggctgtaatgctgcaaaaggacaaggtcatgcaacaagaatgggggcttccctgtaccgtaacaccacgcttcactgctcgactggtacaggaaagacataacctgcattacctggctgatcgggccgcaatcaccgggaaattcagctccccggatctgctgcatatcgaccaggcttttccggtgttgatgaaacaactggagctgaaactggctgacggtgaactctccccctgccaacaacgtaccgtcacgctatacgccaaaggactaacctgcgaagccgatacgctgggttcctgtggttacgtctatatcgctatttatcccactcaacgctgagttttaacctccttaatacggaacatcgttatgaaaattattcctgcaacgacgctgcgggcgacgacgtcatatctgtctcctgtcgtggtctggcaaacattactggcccgcctgctggagcagcactacgggctgaatcttaatgacacaccattcaacaatgaaaaggtgattcaggaacacatagacgccgggatcactctggtcaatgccgtcaattttctggtggagaagtacgaattggtccgtatcgacaggaaaggatttagctggcaggaacagacgccttatcttcgtgcggtcgatattttgcgggcgcggcaggcgaccggcctgcggattcagtgcaaaaacacgaatataatcagccggatggctgattcaagacatgataaaagactttaccagcgcacgtttaaagcgtgcaagagatgttattatactaaaacataaaaacaggcgaggctggtgtaatgagaatcgacaaactgtcactgcttaactttcgttgcttcaaacagctcgatatcacttttgatgagcacattacgattctggttgcaccgaatggcgcgggcaagacgacagtgctggatgcggtacgcctggcgctgttcccctttattcgtggttttgatgccagcctctacgtgaaagataaatcactagcgatccgtaccgaagacttacgtctgatttaccgccaggaggcactgaacatggaaatgtcgtctccagccaagattacagctaccggagaatgggcaagcggaaaaacggcaacctggatgctcgataaacgaggagaacagccgccacatgaagataagatggcggcgcagcttacccgctggggtgagcaactccagaaacgagtacgtgaagagcatagcttgcaacaagttgaacttcccctaatgctttatttggggactgctcgcttatggtatcaagaacgttatgaaaaacagcctactgagcagcgcctggataatagtgccttttcacgtttgtccggctatgacgattgcctctcagccacatctaactataaacagtttgagcagtggtatagctggctatggcttagctaccgtgaacatcaaatcacacaacttgaatcaccttcagcaaagttaaaagaaggtgttcgtgttcaacggatgaaagaagccattcaggctatccagcaggccattaactgtctgacccagcaggtgacaggctggcacgatctggaatacagcgccagccataaccagcaactggtaatgagccatccgcaatacggcaagatccccttatcccagctcagcgatggcttgcgaaatgccgtcgcaatggtggcagatatcgcatttcgctgtgtcaaactcaatcctcatttacaaaatgatgcagccttaaaaacgcagggaattgtgctgatcgatgaagttgatatgttcctgcaccctgcctggcagcagcaaattatccagtctttacgcagcgcatttccgcagatccagtttattgttacgacccatagcccgcaggtgctcagtacggtaaaacgcgagtccattcgtctgcttgagcaggatgagaatggcaacgggaaagcgttgatgccgctcggagcaacctacggcgagccgagtaacgacgtgctgcaaagtgtaatgggcgtcgatccacagcctgcggtgaaggagaaggcagacctgcaaaaactgacaggatgggtggatcaggggaaatacgacgagccgaaaacgcagcaactgatggtcgcattggaagttgcgttgggtgagaagcatccacagcttcaacgcttacagcgcagtattgcccggcagagactgctgaaagggaaagcgcaatgaggcatgtgatcaaaactcaacttgggaccgttgccttactgaccgcacatgaaaacccaccacaagatgctgatcaatcaaccaggcgctggcgaaatttcagaagagataaagccgctgtaatggtccagctcattaacgagcagtatcacctttgttgctacagtgaaatacgctctgatcttcgtggtcttggttatcacattgagcacgttgagaataagagccagcatccagaacgtacttttgattatcagaatctcgctgccagtgcattagattcaggggagaacggcggtttatcttccctgaaaggaaaaaatgcttttggcggtcatgcccaaggaaaacaagatgttgtagatatggcaaaatttatccattgccatattcgcgattgttcccgttattttgcttacctttctgatggtcggatagttcctgctgatgagttaaatgcacaagaaacggagaacgcgcaatacactatcgatctactgaacctgaacagcggattccttcaaacggaacgtcgtaatcattgggaagagctggagcagctttttgatgaacacattgaaaaagattgggatttgcagcaattactccagcttgatttggtttcaacaccagaccataaactgcatgaattcttcagcattacacgccagtttttccagcaagaagctgaacaggtattacagagccacgccccagcattaatttaacaccactattcctgattcagggcgacagcatgatttattgcgagtcgccttcctgatttacgccctcaatatttattcacctttattttaccgcataatgcgcctgccactcccggcaggcgtgtttgcttttatacgaacaaaattatgcaaacagaagctgaaattttaatcgataacaacgagcttatttgctccactaggattgaatggatcgttaccgttcaccagaacgcactacagcaactcacatccctgatgcaaccaatcgcagaaatctcccgcctgacgcagcgtattggcggcgacataattattaacgacatgagactagatgtacgcataacatcgtcataaaatgatatttttagaaattagctaagtgacatatatggcagatgattattttcatattacgctgaatacccggcttccatggtcaaataacgagccaatggcagtaggtaatagcataacaacgaccgatgttaacccattctttaactattaaatatcttacccatatctcagagaaacatttatcccaaatggggtcacccacgatatcagccgtatagcccttctgggacacattgcttcaggaaatctacataatagcaatatgcggtatgtcgcaagtatcggccacgaaacagctaaacatttttgtacttatgtcagagagctaatctgggaatcagtaagaacatcagaatttccagaactgccatctcgccaaaaatgcatttggttaacaaagggggaggacaatcttcattactggattgagcggcttggacgtcccgcagagcagataaccgtattcaaagtactacctgatggaagaatgcatactaccagtgagactcatctttcaggagatgctgaatcttatctggaaagcgtcgaaaaatcccgtcgatactggaggggagaaattgataaccccttacatcaggagatactcttcgaaggcacaatgttagttgaaagcaaagtgtccatttaacaaatgttggggtactgtacagaaaaacagtgaactgctcacaaacgattattctgcattttggactctattgccggtttgctacaatggaaaacagtacctaaaaagtagctcaggaagcccccgaaccctacaagtaaaatcaactggtagccactcccgtccctgatgaacggcgcatcagcttctggccgcagcactttggcctcattccacagtgggtgaccctggagccccgtatcttcggctggatggaccgtctgtgtgaagactactgcggtggtatctggaatctgtacaccctgaacaacggcggggcatttatggcacccgaaccggatgatgggtactgttcaatgccatgaacggtaaccgcgctgaaatgagcccggaagccgccggcattgctgcctgtctgatgacgtacagtcatcatgcctgtcgtacggagtgttatgccatgacggtccattattaccggctgcgggattacgccctgcagcatccggaatgcagcgccattatgcgcatcattgactgaaaggggccggaacaatgcaacagctttcctttctgcccggagagatgacgcccggcgagcgcagcctcattcaacgggccctgaaaaccctggaccgccatcttcatgaacccggcgtggccttcacctccacgcatgcggcacgagaatggctgattctgaacatggcgggactggagcgtgaagagttccgggtgctgtatctgaacaaccagaatcagctgattgccggtgaaaccctcttcaccggcaccatcaaccgcacggaagtccatccccgggaagtgattaaacgcgccctgtatcacaatgccgctgctgtggtgctggcacacaatcacccgtccggtgaagtcacacccagcaaggcagaccgccttatcacggaacgtctggtacaggcactggccctggtggatatccgggtgccggaccatctgatagtcggtggcaaccaggttttctcttttatcttctgtcttcagaggtatcccatcatgaaaattatcacccgtggcgaagccatgcgtattcaccgtcagcatccggcatcccgtctttttccgttctgtaccggcaaataccgctggcacggcagtgctgaagcgtataccggtcgtgaagtgcaggatattcctgcattaccttgcagaccgtgccggtatcagaggccggttcagagatgcggattcgtaccacctggaccaggcctttccgctgctgatgaaacaactggagctcatgctcaccagtggtgaactcagcccccgcyatcagcataccgtsacrctgtatgcgaargggctgacctgtgaagccgacaccctcggctcctgtggttacgtttatctggctgtttatccgacacctgaaacaaaaacgtaaaccaccaagataaccttctgctccggcctggtgttttcaccacgccactgtcccattttttatctctgcatatcaggaaaatcttcagtatgaaaacattacccgacacgcatgtacgggaggtatcgtgctgcccgtctccagtcaccatctggcagacactgctcacccgactgctggaccagcactacggccttacgctgaatgacacaccgttcgctgatgaacgtgtgattgagcagcatattgaggcaggcatttcactgtgtgatgcagtgaactttctcgtggaaaaatacgcactggtacgtaccgaccagcctccgggctcgccgggcaacaggcctgatgaccagccacaactacagaacggtaaataacattaccctggggaagcatccggaggcgaaacgatgaaactggccctgacgctggaagccgacagcgttaacgtgcaggcgctgaacatggggcgcattgtcgttgacatcgatggtgttaatctcgctgaactgattaacatggtcaaccacggaaacagcgctggatatcctcattacgtggctgcaggacaatatcgactgcgaatcgggaattatcttcgacaacgatgaggataaaacagattcggcagcactgttgccctgtatcgcacaggccagggaggatgtccgtactctactcaccagacttcattccactgacgccagcctgaacagggctggcgttttcgtttataaaccaaaaggaaaaacgatgatgtcagatatcacaatctcccgcccggaactggtcaacggacatacggacgttatctgctcaaccagtatccgccacattctggctgtacgaaagagtgcgctgctgcaaatcgacacacttatccggcaactggcagaaatctcagtactgacagaaagtattggaggtaaaaccgccctggactgggcgatgaaacaggattttcgctgcggctgctggctcatggagaaaccggaaaccgcaatgaaagccatcacccgcaatctcgatcgcgaaatctggcgtgacctgatgcaacattccgggatgctgtcattaatggatgcgcaggcccatgatacatggtaccgctcactggagtacgataattttccggaaatcacgtttgaacaactgcaccagaataaggatgacgtgtttgagcgaggtgtgatcaacctcttcaggggactgagctggaattacaaaaccaattgcccctgtaaatttggcaataaaattatcgtcaacaatctggtgagatgggaccgatggggattgcatcttatcaccgggcaacagactgatcgactcgtcgacctggaaagaatgctgcatctgttcagcggcaaaccgatccccgacagccgggaaaatatcactattcggctggatgatcacatccgctccgttcagggcaaagcgtgctatgaagatgagatgttcagcatcagatactttaagaagggctccgcacacatcacgttcaggaaaccagaactggttgacaggctaaatgatattattgcaaaatcatttgggggtgcttatgggggttactcatttacataacacaaataaatcatattaaatcaataaattaaccatcaaatgcgactcctgtgatcgccaaaatgcctcttcagtgatccccatcctgcttatttctgagcaacctgaccctgctgatgtatctggtagtatgacagagtgattcgtttttcttgccgagtgtacgaaaacgtcttccttgccaccgactatcaaccgtcactcaaaaaaacctctctttttttcaagctatcaagaataagttgcattttatctgcaccggacaccagccatccatatatggcttttacctgctacaaagatgaagaagtgcataaatgtgatgttaaaacaatcaaagaaaaattacatgcgcaataatttcactataacattataatccatggtgaaaataacactgcacaaggattgtcatcatcaaactcatcggaactattttttctgtcgtcattggtgtaatactgattgtaagtatcctttcaggagattatttttgccgtgtggggcatggaacttgtaaagcagccaaaagcgctaggcatttaattgaaagtaaagagaaaaacagaagtagtcgcgtcaaagtctttagcacgcatattaatttgagtcatccagcggcatcctggctagcaactcaaacttgcgctaacaatatattcaatctacttcaaaacaataatgccatttatttattcgaaaacgataataaaattgaactgcgaatggggtatgattcttttttctctattgaaacgattgataaaattaacaaagaaaacatcaaagaaataaaactaaaaaatgatacaacatatgtttcccttcctaatccaaccattttaataaccacgacatcaacacctgaacgacagttttctatttctgttctggatgatgataacaaagaaaatctacctaccgataccgcaccttgttttacaattggtattcctgatgaatatactaaagccatagagttattgaacattaaataattaaatttcatattgagtttttttaaataccatatgaataattgttatatgtcattatttcctccattcactaaaactgattgattactctactccctcaccgtcatcggtagtggtatccttaacgtatattgatgaaaagacaaaacagtatgcagagggaaaaatgggttccaccagaaaggggatgctgaacgttctgattgccgccgtgttgtggggaagttcaggggtctgcgcgcaatacatcatggagcaaagccagatgtcgtcgcagtttttgactatgacgcgtttgatattcgccggtttgattctgctgacgctatcatttattcatggtgataaaatcttttctattattaacaatcacaaagatgccattagcctactgattttttccgtggttggcgcgctaaccgtacagctcacttttttgctaaccatcgaaaaatcgaacgcagccacggcaacggtgctgcaattcctctcaccgactattatcgtcgcctggttctcactggtgcgtaaatcccgcccgggcattctggttttctgcgctattttgacatcgctgatcgggacttttttattggtgacacacggtaatccgacatcattatcgatctctcctgccgcgttattctggggcattgcctcggcgtttgctgctgcattctataccacctatccctcaacgctgattgcccgctatggcacgttaccggtcgtcggctggagtatgctgattggcggtctgatcctgctgcccttttatgccagacaagggacaaactttgtcgttaacggcagtttgattctggcgtttttttatttggtggtcattggtacgtccctgacatttagtctgtacctgaaaggagcacaattaattggcggtccaaaagccagcattttaagctgtgcagaaccattaagtagcgcgctgctctctttgctgttgctgggaatcaccttcacattgccggactggctgggaacgctgctgattctgtcatcggtgattttgatttcaatggattcccgccgccgcgccagaaaaataaatcgtccggcgcggcatgagtgagaattaccagccaggcaccgcgccaccgttaaagatggtttctgccgctttagcgacttcgggtgattgataagattgcagaaattccttcacgttttctgcattcttattatcttcccgtgccaccagaatattcacatacggcgaatttttatcttcaataaatacgctgtcgttaaccggagaaagtcctgtttgctggatgtaagtggtgctgataatcgctacatccactttcgggtcgtccagtacacgtggcaactgtgccccttccagctccattatctgcaaatggcgtggattatcggttatatccaacgcggtaggtaataacccttttccttctttcagagtaattagcttctctttttgcagcagtaaaagcgcgcgaccaaggttagtcgggtcgttggggatcgccactgtcgcaccttcttttatttgcgccactgttttgatttttttggaatagcccgccatggggaagacaaacgtatttcccaccgctaccagtttataaccatgcgcctgattatcttgttcaagaaagggtcgatgctggaagacgttcgcatcaagctcgccatgatttgtcgcatcgttcggtagcaacgaaccgctaaatcctaccagttcaacatcgagaccatatttctcttttgctacctttttagcgacttccgcgacatcttgttctgcgccattaataacgccaactttaatatgcttttcatcgctgctgctctggtcgcaacctgccagcagaactcctgccagtaataatgcggcccccgcccgtagatgatgtgttgtcagtttcatttttttatccttttattaatgattacctgactatagcggtaaggtcgctgcagtttaaaaaacgaaacgctatcgataagaataaaaaggaataaaagtggaatataaagtctggcacttcttactgaccacgcaaacacctttcgtacagcatgatgagagcggcaaaagcaaactacacttatgcttcattcgatgcacatttgcagaaggttgccgctatgaagccaacgatgctactcatgattaccgtattcctgatttttccagccatttctcaggccgagtcgccattcagttctctacagtcggcaaaagagaaaaccacggtattgcaagatttacgtaaaatttgcacgccacaggcgtcattatcagatgaagcgtgggaaaagttaatgttgtcagatgaaaacaataaacaacatatacgcgaggccatcgtggcgatggaacgtaataatcagagcaattattgggaagcgttgggtaaggtagaatgcccggatatgtaagaacggcaacaaccactgaccaacgcttctttacctgatatcaggatttcttcattttcacctttgcagtcaccaacaatgcagtcagcaacatcaatgtgccggacaacatcagcggcgaagtcagaccaatgttatccaacgcataaccgccgattgccgcaccgcaggtgttagcaagctgaataacggccacctgaatagatccagccttttctgcctgatcggccaatgagcgagtgatccacgttgaccaaccaacgggaattaaagcaaaggtcagcccccagataatcgcaacaccagtagcaacaattttatagcttccccacagcgtcagtaccagcgcgctcagggcgagcacaaacggtgcgcccgctaaggccagtttcaccgaacgtttgagaataaacgacgaaagcgatgtcccgacaaagctggcgataccaaaactcagcagcaccagggttaagccatcaacaccgaatcccgccagattcatatacactgggcgaatataagtgaaaaaagcaaactgtccggcaaaggacataaagatggcgatcatcccggccatcactcccggacgttgtaataagcggaaagtattttgtttctgatgcgaaggttcacctggcagcgaaggcagtgatttgataatccagaaaatacacagcacacccatcgccgccgccgcattaaagacattgcgccaaccgataagctcgcctaaaaaactgcccaacggcgcggcaatcaccagcgcaatagaaaccgcgccgaagatcaccgacagcgccttcggcaccgtacgcggcggtaccagacgcatggtcagcgacgccgacatcgcccagaacccgcccagcgccagccccagacaggcgcgaccgattaacagcagactgaatgagttggcaaaggaaaccagcaaacaggaaagcgtcagcaaaacggcgaacagaatgacaacgtagcggcggtcagtggcctgaatggtctgggtaataaacaaactggcaaacatcgccacaaaggcggtcacggtcaccgattgcccggcaaccccttccgaaatgcctaaatcctgggccattggcgtcaacaaactgacaggcaaaaactcaacgataatcagacaggcgacgcaaaacgccaccgagaaaacggctgaccagttcggtcgggtgatggcattcgcgccgcggttttcagcaataaattcactcatggtgttacccgtggcatgtttcaggggaaaagccgaccagtctaacattgaaatgtgtgatgcatttaacgtttttgcaacttttacgatgttgcttgagctggagttaagatcgaaacggaacagggcaaagattaccggatgcggtgtgaacgtcttatccacccaccaggtcaggcgcggtctgtaggctgataagacgaagcggttttaatgcagccagtgaacgccctcggcaggctgaaagaacgcgttatagcgcatctgaaaagcattgatatcctgcatttcaggttcggtttcgcgcagaaaacccagcgccagcctgacctgagcatcagtaatcggcgcggcaaggcgggctttttgtaaaatccgatgccattgcagcaggttctgttcgctaccatcgacaatgacaatttgccagatgagcaacacctgcgcggcgttttgcaggtgcgactcatccgggcgatgcaaataacgtaaaaattcgtcaccggctgactttcccatttgatcgaccatcgactccacgggtacgacatcgatgttcagccgatcgctgagacggcgaatcgcttttctggccccggatgtcagcacccgaaaaccaaccacaaacactaccgccagcgtggcgagcattatccagatcatgagttctcctgcgtaatcagaactcatgatatctggaaaccctcgccagttactaatccaccagaataatcttcagtgcaaacagagctgcgaccaccaccacacacaggtttagatcgcgccagcgcccggtgcacactttcatgatgcagtacgacataaagcctagtgcaatcccttcggtgatcgagaacgtaaagggcatcatcaccgtggtaataaacgcaggcaccgattcggtaaaatcatcccagttaacgcgtgccaggctcgatgtcatcaatacgccaacgaagattaacgctccggcggttgcgtaaggaggaaccatcgccaccagcggtgagaagaacataaccagcaggaacataacgccaacaacaaccgcagtcagccccgtgcgaccgccgacagccacacctgaagtactttcaatataggcggtaacagacgaggtaccgataaacgcacccgccaccgaactgacgctatcaacatacagcgccttattcatattggggaatttgccgttactatctattaagccagctttatcagtcacaccaattaatgtccctgatgaatcaaataagttgatcagcataaaggagaaaatgataccggcgagttcaagtgataacgcaccgctcaaatccacttcaccaatgacgccgctaatatcaggcggaatggaatagacgccgctaaaatgaacatcaccgaaaaataatccacagcaagacgtcaccacaatagaaacaagcaccgcggcatgaaaatgacgtgatgacaacacagttataataaaaaaccctaaaatacctaacaacacgccgtgagaacttaaatcgccaatcatcaccagggtgtctttattggcgacaataacgccagtattttttaatcccattaaggcgataaataatccgattccgctggtgataccaatacgtaaacttaatggaatgttggagatcatccagtaccggatacgaaacagcgtgagcaaaaatagcccaactgcgccccagaatatcgcgcccatcccggtctgccaggagatacccatcgcccccacgaccacgaaggcaaagaaggcgttcagccccattgccggagccagtgccacgggtaagttagcaaatatccccatcgcaatactgccgataccggcaatcaaacaggtggtaacaaacaccacttttgggtccatttgtgccgcgccgaggatttgcgggttcacaaaaacgatgtacaccatggttaaaaaagtggtcatccccgcaatcaattctgtgcggacggtggtcccatgctgaggtagtttaaataatcgcgaaagcgtccctgattcattactcacgtaatcggtattgtcattattcatttttttgtccattggaggagatttaatcccttgcttttgtaaaacaaatgacaacaacggttcagtgataattatcacatttcaattgcacattaatggatattctttaataatctcgcgacgtttctttatgataaataataatcaaattgataaaatcaaaatgagaaaaatatgaataattctattaaccataaatttcatcacattagccgggctgaataccaggaattgttagccgtttcccgtggagacgctgttgccgattatattattgataatgtctctattctcgacctgatcaatggcggagaaatttccggcccaattgtgattaaaggacgttacattgccggtgttggcgcagaatacgctgatgctccggctttgcagcggattgatgcccgcggcgcaacggcggtgccagggtttattgatgctcacctgcatattgaatccagcatgatgacgccggtcacctttgaaactgctaccctgccgcgcggcctgacgaccgttatttgcgaccctcatgaaatcgtcaacgtgatgggagaagccggattcgcctggtttgcccgctgtgccgaacaggcaaggcaaaaccagtacttacaggtcagctcttgcgtacccgccctggaaggctgcgatgttaatggtgccagttttacccttgaacagatgctcgcctggcgggaccatccgcaggttaccggccttgcagaaatgatggactaccctggcataattagcgggcagaatgcgctgctcgataaactggacgcatttcgccacctgacactggacggtcactgcccgggtttgggtggtaaagaacttaacgcctatattgctgcgggtattgaaaactgccacgaaagttatcagttggaagaaggacgccggaaattgcaactcggcatgtcattgatgatccgtgaagggtccgcagcccgcaatctcaacgcgctggcaccgttgatcaacgaatttaacagcccgcaatgcatgctctgtaccgatgaccgtaacccgtgggagatcgcccatgaaggacacatcgatgccttaattcgccgcctgatcgaacaacacaatgtaccgctgcatgtggcatatcgcgtagccagctggtcgacggcgcgccattttggtctgaatcacctcggcttactggcacccggcaagcaggccgatatcgtcctgttgagcgatgcgcgtaaggtcacggtgcagcaggtactggtgaaaggcgagccgatcgatgcacaaaccttacaggcggaagagtcggcgagactggcacaatccgccccgccatatggcaataccattgatcgccagccagtttccgccagcgactttgccctgcaatttacccccggaaaacgctatcgcgttattgaggtaatccataacgaactgatcacgcactcccgctccagcgtctacagcgaaaacggttttgatcgcgatgatgtgtgctttattgccgttcttgagcgttacggacaacgactggctccggcctgtggtttgctcggcggctttggcctgaatgaaggtgcgctggctgcgacggtcagccatgacagccataatattgtggtgatcggtcgtagcgcagaagagatggcgctggcggtcaatcaggtgattcaggatggcggcgggctgtgcgtggtccgtaacggccaggtacaaagtcatctaccgttgcccattgccgggctaatgagcaccgacacggcgcagtcactggcggagcaaattgacgccctgaaagccgccgcccgtgaatgcggtccgttaccggatgagccgtttattcagatggcgtttctttccctgccagtgatccccgcgctgaaactaaccagtcaggggctgtttgatggtgagaagtttgccttcactacgctggaagtcacggaataataaaaaaaagcccggcgtcatgccgggcaaaagtcaccagttacgtttatgccactgtcaactgctgaatttttttctcgcggcggattttgcgttcttccatcaccgccactatcgccatcaggcagatacaaccaatcgcggcgatatccagcgcggcgaaggtgcctgcccagccggtaaggccaaataccggcgtcccatcggcaatcattcccagacctaacttggcaaagctgtcaccaatcaggtaagcgaaggtgcctttaataccatcggcagcgccaatcgcttttttaggtacaaagccaacagcagccacaccaatcaacaattgcgggccaaagaccaggaaacccaacgcaaagagagaagccaggtagatatattcgttgctggcgtgttgatacacaccgagcgtggcgataatcagcgccagcgcgatacaggccaccaggccacggcgaccgttcgccaggtcagagagccagccccacagcagcgtaccgaccagcgcaccagcttcaaacagcgtaaagccctgaattgccaccgctttagagagtttcagttcctggaacgcatacacggttgaccactggtcgataccaatacgcaccacatagaggaaaatgttggcaaagcacagcagccagatcactttgtttttcagcacatactcaacaaagatctgccacttggtcatatcggtagattctgtctctttatcctcttcactgatctcctcgccaaacagctcttcagctttgccgaggccataagattccggggagtcgctgccgtaacgcagaccgataaaaccaacaatcagcgcgataatcgacgggaaaataaacatgccgatgacatgaccatcgaacaggtaatttgcgccgaacagcgccacacctgctgcgcctgcaccaccaaggttgtgagaaatgttccagaaaccgaggaatgtcccgcgtttacgacgcggcgtccatttggtgatggtggagtaactgcacgaaccgccggtactctggaaaaagccgcttaaggcgtagaaggcaatcatcaggaacaggctaaccgagccgctgcccatactggcactgaagcccagcatacaaatggcagacaggatcagcatgaacggcaggaattgtttggtgtttttgccgtcggcgtagtaagaaaccagcgttttacccacgccataagtgatggagaagcccaggccgatcatccccagctgcgtcatgctcaacccgtaggtcgagatcatgtcgttctgcgcgatgttaaagttcttgcgaatcaggtacatcgtaaggtagccgataaagaccaccaggtaggattgcatgaacggtttgaaccacattttgcgccgcacttcgagcggaaggtccagggtcggcttgcgaacctggtttaagaaagccagcatgggttactcctgaaatgaatacctgcgtgaggcatgcattgtaaaaatcagcagcaaatcaggcctgagatagcgtccaggcaaaacctggaaaatttcttagttttgccggatatgaagtgaaaaggtgagatgcatcacgcttctcgcggtgtctgggcgttcaaaaagggcagtaatagcagtgcggaaatcccggcggcgatggcgataaccacaaaaaatccgctccagtgccaggtatcgagtactttcgccagcggccaaccagcaagcgacgcaccaagataagcaaacaagccgacaaatcccgtcgccgcccctgccgcctctttgtgggaacactctgccgccgccatgccgattaacatctgcgggccaaagacaaaaaaaccaatggtgaagaagcaggttgcctgcatcacgtagctggcaaatggcatcagccacagcgagccgactgaaagcaaaattccggcggcgaaaatcaaattcatcggcccgcggttgccgttaaacagtttgtccgaaccccaacccgctaccagcgcaccgataaatccgcccagttcaaacattgtcactgccgtattcgccgtgaccagatcgacgcccagcgtctcggacatatacaaattgccccagtcgttgatcgccgcccgaaccacatagaccagcacatagcaaaacgaaagcagccagatatacggattcagcaacacatatttggtgaggatctctttacgcgtcagccctgccccttcttgttgttgagcaatctccagtgcgtcgtgccgccattcaccaaccgccggtaaacctaacgcctgcggacgatcgcgcagccgccagcagagaaaaatccccacgacgatcgccatacaacccgcaatcatcatcccggcacgccagccgtaatgcagcgcgctcgctgccatcacaatgggaatgagtgcgccgccgacgttatgcgccgtgttccataatgcccaccaaccgccgcgctcggtacgagaataccaagcggttaacagacgcgcacacaccggtgaaccccagccctggaaaaaggcgttcaacacccaaagcacggcaaacgcccatagcgacgtcgagaagccaaacagaatgttgataatgcccgtggcaataagccctatccccataaaataacgggcatttgagcgatcgctgacaatgccggagacaaacttcgacacgccgtaggtaatgtaaaacagggtcgctaacaggccaatatcgctacggctgagcacgccgttagcaaggatttctggtacggcggcgttaaaacttttacgcgtgaagtaaaacagcgcgtaacccagccagatggtcagcagaatatgccgacgccagtagcgatagcgggcatcaatttcatgtttatcagtcattaatggcgcatcggcaggcgctttcagaaacggcaacatcatcgaaccttagacataacgttgaggtagagaaacgctgacacgcgtgccgtgcagacaggaaatggtcaatgtgccacccagcgccgttacgcgctcgcgcattccggtaaggccaaaaccgtgttgcccggaatctggcggtaaaccgctgccatcgtcttcaatcaccagcattaaccgctcatcatgctgccagccttgcagggtgaccgcgctggcatcagcatgtttcacaatgttgttcagcccttcctggcagacacgaaacagcgtcacgcgctggttttcgcttaacgctgattcatcgattcgccattcgagatgactgacaatgccgcgcccttccagctccatttcccgcatcagtgagcggatggcctgctccagggtgagatcatccagctggcgcggacgtaaccgccctaacaagcggcgcaccgcgtcgtaaacgcccagcgacagttgttcgatgagctgcccgctctgtttcacgctggcgttatccgccgcgagccgctggacaatgcccgcttgagttcgaatagcagtgatggtctgaccgatatcatcgtgcagctcacgtgccacatcacggcgcacgctctcttcggtttccagcaaccgttcagcgagatgctgattgcgcgccagttccttttgcagcgactggttaagttcacgcaaccgctggatgcctgcgcccagtaacaaccctgtcagactttgcaccagcagcgagagcaataaatccaccggatgatcgcgccaggtttgactggcgatcagcgcgatggcgttcatcaatgtcgcaatcagcgctccttgccaaccatagtgccaggccagcgcgataatcggcagcgccagacagaatggcgtaaagcgcgacagttcgtccggcaatcccaactggagccagaggctgataacaaacagtagcaagtaccagaccagatgccgcccacgccagttgatcggctgggaaaccagtgacgggccgagcggcagccaggtgttattggcgagatagtgccagaacaccagacatatcggggccagcgtcaggccaccagttaaagtcagcagcagcgcattccacgactctttgccgtgccaaagccagggcagcgactgcaacaacgccgccgccgttaacgccgcaccctgtaacagcaaggtgcgccagtcacgttgatggcgatagcgcgagatcagcgccacgggcaacaacgtcagtaaactaccgatcatcaataaggagaaatgggttaaaccgaccgcctgcattagccagtaaatcagcagccactccgcacccagtagcaccggccagtatccgcgcgggcattgcagcattagccctagccgcaggccaaacggaaataacagcaccgccatatcagggcgctcaaccaggtgcaggctgatactccacaggcaaaaccatgcggcagagaagataaaaaagcaggcaataacggtaattaagcgggagaacaacgtcttcatcaccaaccatcaaacatgcggcgcgccagttcaacgtcgttactgacgcccagtttttccatcagattggcgcgatggacgtgtaccgttttcggcgacaagcccagttcggcagcaatctctttcaccgccattccttgcgccagtttttccgccacctggcgttcgcgtttggttagcgggtcctggcgaccggatgccagtttaatggcaatatccggcgtcagataacagccgcccgtggcaaccgtatgcaccgcagcaatgagttcatccgggctacagcgtttggagagaaagccgcgcgcccccgcgttaagcgcctgctcaaccagcgccggactgtcatgaacggagagcataattgtcgccatgcctttcggcagctggcttagaagctccagaccggagatatcaggcatggagatatcgcaaatacacacctgcacaccgcgccccggcagccccgccagcgcctcgcgccccgaaccaaactcggcaactacctgcaaatcaggttccagccccagcagctgcgcaaagccggagcggacgataaggtgatcgtctataagggcaacggtgatcatggtcttgtcctggcgggtaataaaacgcgcttaccttaacgataagcgcgccactgttcaagccttgagcggttactgaaaaaagctgcgctcctgttgcttgtgaaaagaaatgatgccttcaaggtttggtatatcgactaatcattaaaaacgctggcagcattaataccttgttagtatccattttgaataagaaaaatatatattttatatttatagtttgattgtttgtatatttatgaattattacttcagtataaaaaccactctctaaataattcgcagacacagcacatgcaacttgaagtatgacaagcatgcctgcttcattattacactttaataataaaacccaccgattaatgtacaaaaaaatccctgcgtgatattgtctgtaaaaaaggagcagatatgcgcactcaccctcacttaataaaacaaactattgatccacgactcattaatgaaataaacaaaagaacacaaagcaacagtgagaagttatcaaacagtgataaattaacatatattaatgacaactactgtgagataacgcgaaactacacgtcattttatggtatgaacatgctgagcatcgttcttttcttacctatcgttattttatgttttgcctctgttttattctttatatatgacataacatttaacttcgaacgatacttagatacgtggagatacagagcagactctgagttaatgctacatattgcttactgcgcaatttttttcatgtcttttgtttttgctgctattctaaattattttatctttgctccgcgacattacccaatccgttttaatagaaaaacaggaaaggtctatatttgtgattatattcttaatgatatgagtcataaatcaacctatactttctggtggcactatccattctataaacataccaagcctgaatataaagagtacgactgggaacaaattcaaggtatagctttttttgcacaaaatcgccattcctcatactccactattcgctgtattgtttatgaatcattagacagtacaaatattattgacacctttaacctgataacgacagagagtgctatagatgcattgcatatgacaaatcacaaattatggttatggattaatagctttatgaattttgacgatgagtttttagagaaatctatcaatactgctccaggtatttggggccgtgaagtgaattggcctgaagatatgaataagaaatcaatgttgtcttcaatggacgaatatatactctgaataattcgagttacagaatatactcgtcatacttcaagttgcatgtgctgcgtctgcgttcgctccccccagtcacttacttatgtaagctcctggggattcactcgcttgtcgccttcctgcaactcgaattatttagagtatataagctcgcccggatgtaaatatcccatccaggcgagaaaatcacttactgaaaaaacaccgcaatcttgttaaacatcgtcggatcggactgattacgctgcactttcaccacatcttccagcttgtctatctggcttatcatctgctccagacgctggtcgtcattgaccagtagccagatgtggcttttgtcgctgtcctgaatcggcaggcagagaatgccttcaacgttaaaagcgcgacgggcaaaaaggccacaaacgtgggtcattacacccggatggttgcgaacggtgagttccagaatcacgttatcatgagttgtgttttgcatggcttattcccccaccatttcagtattcgccgcacctggcggcaccatcgggtacactttttcttcggcatcaatgcgcacatggatcagcgccgggccagggcgattgatgatttcctgcaatgcagcctgcggatcggcttcgttattcaaatcacaggtttcgaggccgaatccggcggcaatctgcataaagttgattttgcccggataggtagcggcaaaaacgccctgcttgtagaacagactctgttgctgatgcaccagccccagcgcttcgttgttcatcaaaatgattttaacatccagctgattttcactggcggtcgccatctcctgaatattcatcatcaggctgccgtcgccggagaagcacaacactttgcggtccgggttcgccagcgccgcgccaatcgccgcaggcaggccaaaacccatcgtgcccagcccgccggaggtcagccactggcgtgggcgattgagcggataggcttgcgcggtccacatctgatgctgacccacgtcggtggtgataatcgcattgtcatcgacacaggcggcaacggcgttgatcaggccgtaatggcttaatggatcgcacgctttcgggattggacacgggaattcacgctgcaaatccgccaccaactggtgccactctgcacgcggttgcgcttccaccagcgggatcaactgcgccaacacgtcatcaacatccgcctgaattgccacatgcggttgcttgattttgcccagctctgcgcggtcgatatcgacatgaataattttggcattcggacagaactgctcggttttgccaatcgcccggtcatcaaaacgcgcaccgagtacaatcagcagatccgcctcctgcaaaatatagttggtgctgcgcacaccgtgcatccccagcatacccagcgacagcggatgcgcttttggcaacatacccagcgccattaaagtcatggtggtaggcagttgcgctttctccgccagttcacgcactcgcgcaggcgcgttgatcacaccaccacccagataaagcaccgggcgtttggcggcgttaatcatcgccgccgcgtcacgaatactttcttcgctaaaggcgggtgcggcggctttttctgccatagcgggctgtgtttcaatctcaaaaactgccgtttgcacatccttaggaatgtctatccacaccgggccagggcggcctgattgcgcaatacggaaggcatcgctcatgacctgcgggagttcttcgatatgtctgaccagatagttgtgtttggtgatggggatagagatgccgtaggtgtcgacttcctggaaggcgtcggtgccgatcatcgaggcgggaacctgaccagtgatgcaaatcagcgggatggagtccagcctcgcatcggcaatggcggtcaccaggttagtcgcacccggtccgctacaggccatacagaccgccggtttaccgtcggtgcgcgccattccctgagcgataaaccccgcgccctgttcatggcgagccagaatatggcggatttgcgtgctttggcttaaggcatcgtaaacaggcaggatagaaccgcccggaatacccgtcacaatcttaatgccctgctgttccaggaaatgaacgataaattctgcgccggtaaagcgcttacgcgtcgatgttgtgcccgaacttgccatgctccagtccttttcttctgggccgactttccgggaggagcttaaacgaaaaaccccgcccggtttgcgccggcggggttttggaatcgtgtgttgttccagtccctacggcgcattgccgacgaccaccaccacacgcacgacgaccactgcggcggatggcgcagttggtagtagttttgcgttgaacatggaagtagtcattagggaccttgttggttttgtgtttaacaatatttatacaagcacagctttacaggggagacaatggaaaatttttcttccggataaaaatacgtggcagatcacattttgaactgaaactcaggcaataaagcatcatcacctgaaagacggtcagattgttgacagagtgcgccttattcatgtcgaatacagcgtaaacaccttaccctaccaaccgcaccatcactgttcccggcaacatttattgccgcttttgtttacatattctgccgctaaacaattccccattcctggcgtatatctggctaacattcatcaatgtgatagattcctctcccgcatttatgggaatgcgtagtgacttattctaattatttttataaaagcatccgtgataatgaaaaggcatagaaacgtcaatttgttattgatgttggtattactcgtggccgtcggtcagatggcgcaaaccatttatattccagctattgccgatatggcgcgcgatctcaatgtccgtgaaggggcggtgcagagcgtaatgggcgcttatctgctgacttacggtgtctcacagctgttttatggcccgatttccgaccgcgtgggtcgccgaccggtgatcctcgtcggaatgtccatttttatgctggcaacgctggtcgcggtcacgacctccagtttgacggtattgattgccgccagcgcgatgcaggggatgggcaccggcgttggcggcgtaatggcgcgtactttgccgcgcgatttatatgaacggacacagttgcgccatgctaacagcctgttaaacatggggattcttgtcagtccgttgctcgcaccgctaatcggcggtctgctggatacgatgtggaactggcgtgcctgttatctctttttgttggttctttgtgccggtgtgactttcagtatggcccgctggatgccggaaacgcgtccggtcgacgcaccgcgcacgcgcctgcttaccagttataaaacgcttttcggtaacagcggttttaactgttatttgctgatgctgattggcggtctggccggaattgccgcctttgaagcctgctccggcgtgctgatgggcgcggtgttagggctgagcagtatgacggtcagtattttgtttattctgccgattccggcggcattttttggcgcatggtttgccggacgtcccaataaacgcttctcaacgttgatgtggcagtcggttatctgttgcctgctggctggcttgctgatgtggatccccgactggtttggcgtgatgaatgtctggacgctgctcattcccgccgcgctgttctttttcggtgccgggatgctgtttccactggctaccagcggcgcgatggagccgttccccttcctggcgggcaccgctggcgcgctggtcggcggtctgcaaaacattggttccggcgtgctggcgtcgctctctgcgatgttgccgcaaaccggtcagggcagcctggggttgttgatgaccttaatgggattgttgatcgtgctgtgctggctaccgctggcgacgcggatgtcgcatcaggggcagcctgtttaagctcacgtcaccgcagcatcgtcatcagctccatgggagaacgatgctgctttatcagatcacgcatcacccgcatatgcggcgcggagtaagaataaaacgcctgatagcccgcacaaagcacgttgtctggcgtctcctcccgagcgtgcgggcacaggcgatgccagtcgcacgcctggcagccacgacgcggttgcgggttttcgctgccacaccatttttgtagggtggcgtcaaaaagctcaatcgaaatacgactgatatctgcccgtacccaacactcgaacaaggcaattaaaaatttcccccacagctctgctgtcaccgaagcggccgtcagatcgccccggtcatcaaattcaagatggggaataagctgtacggagcggataccccgttgtttgaaattgtgataaaaatcggcaggttgcagagcatccttgtactctacaaccagtttatgcctgtcctcttcagcatcaatgacctgacttcctgtcatgcgactctctcaataaatacgataagttgatgtatatgcgttacagcaaacagtattgcgagagataacaccgcgagggagatcaaaaatttgtcacggactacgtgaaattgggaaaaatcgctattcgtgacatccattaaattgcgattacgggtgtagtgccagaggatcagcgccacaatggcgagaatgccaatcgaaatccagaataacatgcccgcctggtgccagttgtgtttgatagccaacgccatcaacgcgccgtagcccagcatggtacgaaaccacgccagtgatgtacgctccggctgcagccctgggtcggcaatgcgtctggctttgcggctatccggcatacaacaccagtcccataacgatcaccgctacgaccatcaatattaagctgatgattaataagctgttggtgtagggcaggtcctctttcagacgcatcgctttttcattgcgtaaccagcgcaggtagccatacatcgctaacccgccggaaaacagacacaacaacaacgccagcagttcgcgaatgacgggcgtggcgaaatctggcgcaagttgatcaagcccaacccccgccgccagaaagcctagtgcggtacggatccacgccagaaaagtacgctcattagccagcgagaagcgataatcaggtgcttctccgaggcgggaaattttcattgttgctccttgtaaactgttcctcgccgaaaaagtaggccaggaacagcaataatgcatcagaacttctgttttttctcttccaccttcaccccttgtgtcggtaggccggtgtcatagtcgcgtaccactggcgaatagccatcttgtgggcgtggacgaaacgcccccatccagcgcggtcgtgcatctttacgccacggacgcagactccactggtaactgcggaacggatcgcgaattttatccatgtaatccaataaggcgtcatgcattttgcggcgaacgtcggcaaaacggatatcatcgatcagattatgcatttcatttaggtcattacggcgatcgtaaagttcatcactggtgaagaggttgagtaccagtttaaagtcatccgtcacccagcaacgcaccggaataaaaccgccaaagctgtcatgctcaatctcgtagcggttaaattccaccattacgccgcgtggctctttcacggcaaggatattttcccccggcagaatctctggtttttcaatatctgccagcgccatcattgtcggcagtaaatcgatatgactgactggcgtatcgacctgccgccgctccccttgcggcgaacggatgatcagcggaatacgggtgatgtcgtcatacatcgccgctcctttactgatcagcttatgtgcgcccatcatttcaccatgatcggaggtataaatgacccacgtattttcacgttgctctggcgttaaggcattgatgacccgtccgatttggtcatcaacaaagtcattgcaggcaaaatagagcggatggtgataaagcccgtcatcaccgactggcgatggcatcgcctgcgcccataagcggtgatgttccggtttgttcgccaggtcatcctctgctttctcacccagttcgtagtaaaaatcagtgtatttctctaaatactccaccggacaggtgaacgggtgatgcggctcatcatacgaaatcaccatcaggaaaggttcgtcggcgcgcgcgggctgttgcagaaaatccaccgcccgattgctgatgcggtgcgcccaggtgaaggtttcgtcaatatggttcgcctgtaaatcctcaacgctgtttaggccattgcgccacaggctaatctctttctccgtcagttcactaagatagttcgcgccatcgaaccagtaatcagcgtcccactccggcggacactcgccagtgccgaaatagtcatgtccatcgagatgccatttgccgatgtagcaggtgtgatagcccgcatccttaaagtagcgccccatggtggaaatgtttttgcccggcgcgacgttgttggtccacgggccggactggttagcgtagataccggtgaatagtccggcgcgtgcaggtgtacaaaccggtgaacaggtgtaggcagaattaaagcgaataccttctgccgccagactatcaatattttgcgtattcagcggcttaccgctatagcaaccgaccatattggtggcctgggtatcggtcatgatgaacagaaaattggggcgtttcataggctatccttcgcatcgggagtaaaggtgacggctgggtcgtgacgatgccgccagctgtcaaaaatcaggtagacaatcactacggcggcgatgaaataactgatcatcgctaaccagcgcgtaccgtagccaccgaattcagccagcccggcatagacgccaatcatcgcgaacaggataccaattgacgcaatcttgacgtttttccacggtttcatgtccaccgcaaacgcatctttgaaggtgaacggcgtggcgcgcggtttgataaaaccgatcatcagcatcacgaccacgttgatgcagaacgtacaggccagcacatagaggaaatggaagtcgaacttcaccagatagttgatggtgatgtagctgattatgccaatccccatcgccacttttgccgccagcgccggaatgcgcgggaagaaaaagcccataatgatgatggtaaccagcggcacgttgtaaataccgttgagctgtttcatccagctatacagcccctgcggcgcgttggcgatccacggcgcgaccatcaccgaaacgacggcgataaagaaaccaaatttgcgcccgacggtgaccagctgttgcggctcggcattctggttaatgatgcgccggtaaatacccatactgaataacgtactggcgctattcagaaagccgttgaaggtactgatcaccgcaccaaataacaccgcaccgaagaagcccaccagtggcaccggcagaacgttattgaccagcgtcgggtaggccatgtcggctttcggtaaatcctgatacagatgaaacgcaatcaaccctggcagcaccagtaccagcgggtcgagcattttcagcaccgccgttaacagcgcccccttttgcccttccgccaggctttttgacgccagcgtgcgttgcacgatgccctgatttgtacaccagtaaaaggtgttcaccagaatcaaaccggtaaatgccgcgccaatcggcaagggatcggtcgggccgccgactgagtttaatttctcggcgtgaacggtggtgagttgctcaatgccctgcataaagctgcccttgcccatcgcgatcaggccaaataacggcaccatcaacccgccaataaccagcccaataccgttaatggagtccgccactgccattgcgcgcagtccgccgatcaccgcatacaaaattcccgccagaccaagcaaaatcaccagtaaccagatagccgcaccatcggaaagttgtagcgactcacccacatgaaacaggctgttgagcgccaacgcgccggaatagagaacaatcggcagaaagcagacgccggtggcaatgaggaagcagaagtcgatgataatacgcgtcgttttatcataacgttcctccagaaaatcggggatggtggcaatgccgcgcttcagatagcgcggtaaaaagattagcgcgaggaagatcagcgtcactgcagaggtgacttcccagcccatcaccgacatgccacttttgtaggcctgcccggaaaggccgaccagttgttccgtggaaaggttggttagcattaacgaagcggcaataaccggcgcttttagtgaacgtccggcaagaaaatagccttgttgcgatccggtatctgttttacggaccttccaccaggtgatgaccgctaccagcagcgtaaaaccgacaaaactcaagatttgtaacgaattcatctcatagcccttatttatgtttatgtcccggacgcatgaatatagggagaggtaaaatgcgtcgggtcaggcagtcagattcttaaaatacaaacgtcatatccctgaacggattgttttctgttaagttcaggttgtgagcataattcgccggagggatattaaaatgaatggaaaattgcaaagttcggatgtaaaaaacgaaactccgtacaatattcccttattgattaacgaaaatgtgatctccagcggaatttctctgatatcgctctggcatacctacgccgacgagcattatcgggtgatctggccgcgggacaagaagaaaccgcttatcgccaactcatgggttgcggtgtataccgtacaaggatgtgggaaaattcttttaaagaatgacgaacaaataactctgcatggcaactgtattatatttttaaagccaatggatattcactcttatcactgtgaaggtttggtctgggaacagtactggatggaatttacccccaccagtatgatggatattcccgtcggtcagcaaagcgttatttataatggcgaagtttataatcaggaactcaccgaagttgctgagttaattacttcaccagaagcaataaaaaataatctggcagtcgcttttctgacgaaaattatttatcagtggatttgtcttatgcacgcagtcggtaaaaaagatccacaacggcggcaaattgaaaaattaattgccactttacatgccaatctacaacaacgctggagcgtagctgatatggctgccacgatcccctgtagcgaggcctggttgcgtcgtctgtttttacgctataccggcaagacgccgaaagaatattacctcgatgcgcgtctggatctggcgctatcgctattaaagcaacaagggaactcggttggcgaagtcgctgatacgctcaacttcttcgactcctttcatttcagcaaagcctttaagcataaatttggttatgcgccgtcagctgtgctgaagaatacggacaggtaataaccagaatggcgagtgtgtaaatgactcgatgatgttcagaaataccaggcggagtaccatttacggcgactccaccgggaaaagagttaaccgatactccagaagagcaccgccagtaattggggtgtgataatgcgcaggaacatcactaacggatagacagtggcgtaagagagcgccgccgcaccgctggttggatgaagattattagcaaacgccagcgccggaggatcggtcatggaacctgccagcatcccgcacatggtcaggtaattcattttggctaacatccgcgccagaatgccaacagtaatcagcggaacggcggtgatcagggcaccataaccaatccagcttagcccttcgccatccaccagtgtatggataaaatcgccgccggatttcaggccaaccaccgagagaaagagcacaatgcctaactcgcgtagcgccaggttagcgcttggtggcataaaccagtacagcttgccgatactgccgatacgcccgaggatcaacgccataatcagcggaccgcccgccagcccgagtttcaacgccgccgggaacccaggcacaaagacgggaatagaacctaacaatacgccaagcccgataccaataaacactggcagcatctgaacctgttgcagtttttgctgcgcattccccagcacattggcaacggcatcaattgcggacggacgccccaccaggttgaggatatcgccgaactgcaggctgatatcgctacttgcaactaattcaacaccagcacggttcaggcgcgagataacaacgtcatagcgttctttaaagtgcaggtcgcgaatacgtttaccgagcacgttttcattggtgaccaccacacgcgcgacgcgcaaatcagtgcctttcgtagacagcgaggtatcgacctcctgaccaatcaccagttgcgcattatgtaaatccgcaggctgccccaccagatgcagcaaatcgcccagttgaataacggtttctggcgaaggcacttttagggtttcttctcgtttcaatcgtgagcaaataactttatcgccattgagaatcggcacatctttaatggctaaattatgcaaattaggattctcaactcggatgttaatcgtcctgattagcgcaccgccgttggttcgcgtggactcgtgctgctgggcctcagtctcaacattgacgcggaaaataacccgcagcatccacatagtgaacaaaatgccgcaaatcccaaatggatacgccatcgcatagctcatccccatttgatcgaccatcgccatcggtgtccccaggtcgcgcaagatctgctgccctgcccccagcgctggcgtattggtgaccgcgccggaaaaaatccccagcactaccggcagtggaatatcaaacagtttatgcaggatggcggtaaccagaccaccgatgatgacgatcagaacagcaaacaggttgaggcgtaatccggagacgcgcaatgaggcaaagaagcccggccctacctgaatcccgatggtataaacgaacaggatcaggccaaactcctgaataacatgcagcatatcgctacttaatgtcatccccgcctgagaaacaaaatggccgacgatgatcccaccgaacagcacgccgccaatgcccaatccaacaccgcgaaacttgacgttgccgataaacaacccgacgaccgccaccaaagccagaatactgaccgttaatgctatatcactcatcgtccatttctcttgaaataacattttaattgctacggattatggctgaatcggtgaagcagatttgccttatagcgcacattatcacgggaaagaacgtgccgaaatatcttaaacaggcgaaatttaacgcattgctgaagaaaaaagacaaaaaaaagccccaccagaatggcggggcaaagagaatagctagttagctatttaacgcgggacgttcgctgatagcgatacgctgcgctgcgatgggttcaggctcattacgaattaaatcaatatgcagtaaaccgtttacgaaggttgcgccagagacttccatattttcagccagcgtaaagctcaggctaaaagactgattcataagcccttgatgcagccattttttctcttcttttggctgctctggcgtgccttttacgctcaggcgcgtaccttccagttgaatctctaaatcttcctgacggaaacctgccagcgcaagggtaatgcggtagtggttatcgtcgcttttctcaatgttgtacggcgggaagctctggctttcaccggcgttttgcagtgcgttggccagtttgtcaaaaccgatccattgacgcatcagtggggataaatcgaagttacgcatagtcatttctccttctaagaagcgagtaattacctgcaaatccgaagattcgcatatgctccctgacggcgagcatggaaatgtcaggccgcgccaggcggccttagggaattagttgatttcgatacggcgcggttttttcgcttccggaatcacgcgttcgagatcgatatacagcagaccattcaccaggttagcaccacgaacatgaatgttctcagctaactggaatttacgttcaaagttgcgttcagcgatgccctggtacagataggtgcgctctttttgttcgtcggcgtgagcacctttcaccaccagcagattatcctgggcggtaatttccagttcgctctcagcaaaaccagccacagcgatagcaatgcggtaatggttttcgtctaccagttcaacgttatacggagggtagccgccattactctggctctggttgttttctaagtggttaaacaaacggtcaaatccaatagcagaacggtaaagcggggataaatcaaagttacgcataatcaatagctcctgaaatcagcgagaatctaagaccttccacaatggacaggtcaggtagccagaacacccatcaggcgcgtcctcatcggctacgatgtaaaaatgggtctggaaatgaacttttcaagccttatcagcggacttttttttgcagtttatggtctattgcatagactgagggggcagcacgaaacgttaaagtgcgatagccgccacagtgcgacgtaatgatgatgttattttcagcaagggatcgctataactcatcaggccaacacccacgatcaacagatgaatttattatgataagaaatgtgttgttagcgttcatgatatgcagcggaatgacattactcggaggatgctccagcgtgatgtcccataccggggggaaagaaggaacgtatcctggcacccgcgccagcgcaaccatgattggcgacgatgaaaccaactggggcacaaaatcgctggcgatactcgacatgccatttaccgcagtactggacacaatattgctaccgtgggatgtgttccgcaaagacagctcagtgcgctcgcgcgttgaaaaaagcgaagccaacgcacaagccaccaatgcggttattccaccggccagaatgcctgataactgatttagcgatcagtttcggtgatccacaactgaccgtcctccatccacgccaaccattgaccatccggcgagaaaaccacggcgtccgcagaaggtggattggcgtggttttcggttaaatactcaacctcgccgctttgcgcatgggcacaagcaatccgattatccagcacaaagcccaaccattctcctgatggatgccagttaaatgcagactgaatatccgttttgttatgggttaactggtgcggctcgccgccctgtggcgagataagccacagttgcacaatgccgttatcatcacgcattaaaaacgcgatttgcgtaccctgcggattacagcgcacccagtggcgcgggacgttgactaaccccggataagcccgatggtgggtaaaggttaaacgtcgctgcacgacgccacgcggtggcgcgggcagggttgtttccgttccacttaacggcgcatcacctgccgctttccagccagcttcatctttcggcaactcgacaataaacagctccggcactttctcgccctttgccgaaagtgtgtcgccaataaacgccagcgcgtgatttcctacccatccttcttcataagcacgattgatttcatcactgccaggctgtggcgtgggcgtggttttacttaccagcacgcaccagtggctaccgctgtattcacgcggatgctgcttttgtacgttgaccgggccaaacggtgcagcaacaccgacatttcgcaaatccagcgccggatcgagttcatgcattacatggtcgttgtaggtaaagctcaccctttcaccgtttgggctaaagacatgtacatgactgccgccgcgcagcgctcctggcgtatatggcgcggtaatatccattgcatcgagattgctcaccttgccgctttcaacaatcactccgcgccgatgatgaaagtcgtaataccatgtttcatcaggattttccgggccgtggatgaagacatacttctctgacttcggatgaacggtcaccacgccgacgtatgcgccctgtgacgcgcgatagataacctcgacctcgccggtatggatattcacacgctcaatggtctcgccggtaaacgacgccccagaaggccgcacgtcaaacaccagccactggctgtcgggcgtccaggtattggtattggtgagcaggtgattacggggagcaaaggttatctgtttcatggcgtggtcctgatacaaaacggttcccgccatcatacttcacaaggacttcactttcagacaatagtcttttgccatcgtgatgaatgtgagtgaaaagatggaacatttcgacgtggcgattattggcctcggcccggcagggtcggcgttggcgcgaaagttagcaggcaaaatgcaggtgatcgcgctggataaaaagcaccagcatggtactgaaggtttcagcaaaccttgtggcggtctgctggcaccggacgcgcagcgatcttttattcgcgatggactgacgcttcctgtcgatgtcatcgccaacccgcagattttcagcgtcaaaaccgtcgacgtcgccgcatcgctcacgcgtaactaccagcgaagctatatcaatattaatcgccatgctttcgacttgtggatgaaatcgctgatccccgccagcgttgaggtttaccacgacagcctgtgtcgaaaaatctggcgtgaggatgataaatggcatgtcatttttcgcgcagacggctgggagcagcatattaccgcccgctatctggtcggtgccgatggtgccaactcgatggtgcggcggcatctctacccggatcatcagattcgtaaatatgtcgccatccagcagtggttcgcagagaaacatccggtgccgttctactcctgcatctttgataatgcgataactgactgttactcatggagtatcagcaaagacggttattttatctttggcggtgcctatccgatgaaagacggtcagacgcgtttcacgacgctaaaagagaaaatgagtgcctttcagttccagtttggtaaggcggtgaaaagcgaaaaatgcacggtgctgtttccctcacgctggcaggattttgtctgcggcaaggacaacgcctttctgattggcgaagcggcgggatttatcagcgccagctcgctggaggggattagctatgcgctggatagcgcagagattctgcgttcggtattactgaagcagccagagaagctcaataccgcttacaggcgcgccactcgcaaactgcgtttaaaactcttcggcaagatagtaaaaagccgatgcctgaccgcaccggctttaagaaagtggattatgcgcagtggagtggcgcatattccacagttgaaagattatccaacgcgcttcacatcgcccaccagcaggatgtaagagagcgcgccaatcaacgcgacggcggagatataaaccagtgcaggtgcgaaaccgtaaccctgcgccaggtaccccaccaccagcggaacggtgatgccgcccagaccaccggcaaagttaaacacgccgccggttaaaccaatcaggcgcatcggtgccagagaagagaccagcgaccaggtaatcgaagcaaaaccgttgccgaagaatgccagcgccatcaggcacataatcatcatcggatcgttggtgtagttcgcacccataatgcaggtggagatcagcaagccgcagataatcggcgttttacgcgcaaagcccagtgaaaagcccttacgtaccagcagatccgcgacccagccagagagcaggacgccgacaaacgccgcgaggaatggcaccgtggtcataaagcctgctttcagcgccgtgattcctttttcctgggttaaatagttcgggaaccaggttaagaaaaaccacagtgtagaagccaccgcaaattgcccaagatagacaccgatcagtttacgatggaacaccagtttccagtctttggctgttaacggctgacgtgcctcttttttcaccggcgcatcaccatccaccagaccgccaccatcacgaatgtaatccagttcagctttgctgatgcctttggtcaggcgcggcggctgataaaccttaaaccaaatcagcgaccagataatgccgataccaccggtgacaatgaacacccagtgccagctcaacatctcctgaatccagatcagcagcggagtcagaaacgccagaccgacaaactgaccagacgtataaaaaccaacggcagaagcgcgttcatgttccgggaaccagctggtcaccatccggttattggtcgggaaagcgggcgcttcgaaaataccggttatcgcgcgcagaccaattaatgacattaatcccgtggcaaagccctggaataacgtcgccactgaccagccaaatatcgcaataaaataagtcacgcgagaacctacgcgatctaaaaaccaaccgccggggatctgacatagtgtataaagccaggcgaaggccgaaaatacatagcccatttccgctttggtaataccgaactcttcctgaatatgggcggaagccacggccaggttagcgcggtcaacataacaaatgaccaccgtaataaagatcatcaccagcgtcagataacgccgacgccccggctttgctgcattaacgggaatatccatagcgagctttctccagattttgggcatagcgaagccgctcaccatgccctgtaatttacagagggttatatttttgtattgctgttttagtgcccgatgaggggcttacgtggcaggaattaccactctgctacgctgttatcttcatgacgccagagcggattacgccagtccggggcatttttactgaactcaataactttggcttcgtcgatttccacgcctaagcccggtttcgttaatggtttaaagaagccgccgaccatgctgaagtcttctttatttttcacaaagtcgagtaactccgcgcctttgttgtaatgaatgcccatactttgttcctgaagtaccgcgttataggaaacaaagtcgatatgcaggcaagccgccagtgcaatcggtccgagcggacagtgcggcgcaagggtcacgtcataggcttctgccattccggcaattttgtagcattcggtaataccgcctgcgtgggagagatccggttgcagaatcgaaataccgcctgcctccagcacacgtttaaaatcgaagcgtgagaacatgcgctcacccgccgccagtggaatatgcgtttgtgccgccagtttcgggtagtattcggcttgttccgccagcaccggctcttcaataaacagcgggcgatacggctccagttctttaatcagcactttcgccatcggcgcgctgacgcgaccgtggaaatcaagaccaaactcaatctgattgccaaaagcttcacgaatttgtgccacggtgttgaccgccgcatctaccgcgcgggagttatcaattagccccagttcttcacaaccgttcagtttgaaggtatcgaagccgatttcgcgcagggttttaatgccgtcgataacatccgccggacgatcgccgccgacccaactgtaggctttaattttgtcgcgaaccaggcctcccatcagttgccacaccggcgcattcagcactttgcctttgatatcccataacgcctggtcgataccggcgatggcgctcatcaggattggaccgccacgataaaatccggcgcgatacatcacttgccataagtcattgatgcgcgatggatcctgaccaatcaaatagtcgctcagttcgtgaactgccgcttccactgtacgggcgcggccttcgatcacgggctcgccccagccgaccacgccttcatcggtttcaattttcaggaacatccagcggggaggtaaacgatacgtggtaattttggtgattttcattgcactgcctctcgatacgccttaacaaatgctgctgcctgctgcgcggtgcgttctacggattgcccggcgcgatagagatcgctgcctaaaccccgccccagcacaacctgcgtctatccactgcgccaggttttctggcgtcacgccgccaacggcaaagactgcgatgtccggtggtaataccgcttttaacgctttgatgtattgcggaccaaaagccgatgacgggaatattttcagcgcctgcgcacccgcttcgagcgcggtaaaggcttcggtcgccgtcgcgcagccggggcaaacggtcatgccgtagcccaccgcacggcggatcacttcactatggatattgggcgtaacgatgagctggcagcccatcctggcgagtgcatcgacctgttcaggtttcagtaccgtacctgcgccaatcaacgccttatcgccgtatgcatcaacgatggcgggaatgctctgctcccattgaggggaattcagcgggatttcaaccgcgtcgaacccggcgtcaatcaccgcgccaacatgcgccagcgcctcgtcgggcgtaatgccgcgcaaaatggcgatcagcgggagtttagtttgccactgcatgagcgatgctccttataccagcctgaaatgccgtgtcgcccgctaccgccgccacgtcgcaacccatcgcctgaaaggcttgctggtagcgcgcggtcagcgatgttccggcgacaagggtgatggcgtgttgatgggtcacatagtcgcgcatactggcaacctctgcgccaatcaacaaaccagagagaaattcactgacctgttcgcggggaagtgttcccagcacatgcgaggcgcgaacttcaaaaagctgcggcaatatggcgggcgcattaaggccacgctcaaggccagccgcgaaggcatcggcagcgttttcctgcggcggcaaacctgcgccaatcaatgagtgatttaacagtaaatgatgtaattcaccggtcattacggtgcgaaaatcgttgatttgctggctatcggcctgcacccatttgcaatgcgtaccgggcatgacataaagagaggaaggagccaaagcacgcgcgccgatcaattgtgtttcttcgccgcgcatcacattgtggttatcatcatgagaaacgcataatccgggaataatccagatattgtcgccaacagacgttaattgttcgccaatagatgaaaaacgggcaggaacagataaatacggtgcaactttccagccgacattgctgccgaccattcctgccattaccactggcgtattctcttcacgccagtcggtcgtcacttctgctaacaccgcagccggagattttccgttcaggcgcgtgacgcctgcttctgattgcctgctgtccaggcagtggtcgccctgataaagccaggcgcgcagattggtcgatccccagtcaattgcgatgtagcgagctgtcatgtgatttcctttaaccttcgtgtcgagctggcgatcatggtaagcgccgcctgctctgccgcatcgccgtcctgatgccttatcgcatcgaacagcgccttatgttcctggagcgtttgcggcatgttggcctcatcgcccatccaggttcgttcaaaaaccgcccgctgcagcgaactgatcgcaatgctcagttgctgtaacaccgggttatgtaccgactgcagcaccgcctcgtggtagcgaatatccgcttcgttaaacgcttcgcggtcctgattgttagcaatcatctcgttcagcgccgattcaatctgcgccagatcgctggaggtcgcgcgctctgctgcccaacgggcaatagccggctctaccaggtttcgcacttcgctcattgcactgataagccgtgggtcatagtcgttttccagcacccattgcagtacgtcagtgtcgaggtaattccactggttacgcggagccacaaacgccccgcgataacgtttcatttcaatcagccgcttcgccatcagcgaacgaaatacctcacggatgatgttgcgcgaggttgcaaactcctcacagagttctgcctcagccggaagcggcgagcctggcacgtatttgccgtgaacgatctgtttacccagcgtaataacgatgcgatcggttttattgagagtcatggagagtccttgtgctctgtatgttcttctctactttaccccgatcgatgcataacgcggcaattttgtagtaccagcgtgatgacgttcgcgtttgctgtgcgcctaatgtagtacaaacttatatagttgtactacaatttagatcacaaaaagaacaacccataagaaaatgttctacgtcgggcaaaaatctgaaaagggagatcaggcgctaaactggggggaaagaagagtatgctttcaacggcttagtactcttgtttaaaggattaatcatgaagttgaatcttaagggatttttcaaggctgccagtttgtgttctttggcatttgcgttgaccggatgtatcacctggggattggtttccaatactgcaagccgtccacatgccgagcaatggcggtcagacacgattaagggtttatcgctggcagaagatagtaacggtacgaaaggctatgtttttgttggtgaatcgttggactatctgttgaccaccggcggcgatgaggtggttaaaatgctgaacgatccggcaatccatggtgaaagaatcaccgtttctgataacgcgaaatttattttaagcagcagtaataagaatttctctggtgctattacgctctattacgactggaacaacgaagaagataaggcactggcaacacaatatggttttatttgtgatacccgggcgttgtacatggatgctggacggtttgaaaggctcaatccaccagaaaaataaaaaagcggattactcaaacgtgatggttttccatcaaccctttacggtgggattttatgagtacaaagcaacagatggcgtcccgcgcggcctcgttaatgcgctgctgccagtcactcttacgctggatatagtaacgtcaccactccagttcctgattttatgcacgaccagaaattgttaatcgctgcgggcaaacgcattcatgccgtttgcccgttcactgattaattcagcacatacttctcaatagcaaatgccacgccatcttcaaggttggatttggtgacaaagttcgccacttctttcaccgaaggaatagcgttatccatcgccacaccgacgcctgcatattcaatcattgcgatgtcgttttcctgatcgccaatcgccatgatttcttccggtttaatacctaacacgtcggccagtgatttcacacccgtacctttgttaacgcgtttatcgaggatttcgaggaagtacggcgcacttttcagcacggtgtatttttctttcacttcctgcggaatacgcgcaatggcctggtcgaggatggcgggttcatcaatcatcatcactttcaggaactgggtattggggtccattttctccgcttcgcagaacaccagcggaatggtggcaacgaaagattcatgcaccgtgtagtagctgatatcacgattggcggtgtacagcgtggtgcggtccagcgcgtggaaatgagaaccgacttcgcgagagagtttttccaggaaacggtagtcgtcatagctgagagcggtttgcgccacggtgctaccatcagcggccttctgtaccagcgcgccgttataagtaatgcagtagtcgcccggctgttccatatgcagctctttcaggtaattgtgaacacctgcataagggcgacccgtcgttagcacgacattcacgccacgggcgcgagctgcggcaatcgcatttttaacggcaggtgaaatggtgtgatcgggcagcagaagggtgccatccatatcgatagcaatgagtttgatagccatgagttccccaggtagattggttcctgacccatgctaacgcgattccgctcaaaaatcagtacaacacccgagggaaaagggggatgcaacgcgcattgcgtgctccccttttgcttagcggaaaagtttccctttcagcagttccatgcctgcggaaagcagatcgttatgggcttgtggtgacacttcaccttgcggtgagagcgcatcaataatcttcggcaattgttctgccagtaaactggaagctgtactggtatccacgccaagtttttgcccgagatcggacaccgcatttgtgccgagcgccgattccagttgctcgccgctaactgattgattgctctgttgattactcagccaggttgagagaatggcccctaagccgccactttgcagtttttccaacagcacttgaatgccgccctgttcctcaacccagctcaaaatggcctgatatttccccgcatcgcctttcagaaaggcaccgacaacgtcatcaaaaagccccatgataatcacctgtaaagcgttacgtgttgacccaaaaagtatagatctgcgggatgataattgcggattgcagaaataaaaagggcggagatgatctccgcccttttcttatagcttcttgccggatgcggcgtgaacgccttatccggcctacaaaaacatgcaaattcaatatattgcaggagtctcgtaggcctgataagcgtagcgcatcaggcacgctcgcattgttaacgccattaaatatcgatattcgccgctttcagggcgttctcttcgataaacgcacggcgcggttcaacggcgtcgcccataagcgtagtgaacaactggtcggcagcaatcgcatctttaacggtaacgcgcagcatacgacggctttccgggtccatggtggtttcccacagctgttccgggttcatctcgcccagacctttataacgctggatggagaggccgcgacgggactctttcaccagccagtccagcgcctgctcgaagctggctaccggctgacgacgttcgccacgttcgataaatgcatcttcttccagcaagccacgcagtttctcacccagcgtgcagatacgacgatattcgccgccagtgataaattcgtgatccagcggatagtcagtatccacaccgtgggtacgcacgcgaacaatcggctcgaacaggttttgttcggcattggtatggacatcaaacttccactggctgccgtgctgttctttgtcgttcagttcgctgaccagcgcgttcacccagcgggtaacggtctgctcatcagagagatcggcttccgtcagcgtcggctgatagataagctctttcagcattgctttcggataacgacgctccatgcggttgatcattttctgcgtcgcgttgtactcagacaccagtttctctaacgcttcgccagccagcgccggtgcactggcgttggtgtgcagcgttgcgccatccagcgcgatagagatctggtactgatccatcgcttcgtcgtctttaatgtactgttcctgcttacctttcttcactttgtacagcggcggctgagcgatgtagacgtgaccacgttcaacgatttccggcatctgacgatagaagaaggtcaacagcagcgtacgaatgtgcgagccgtcgacgtccgcatcggtcatgatgatgatgctgtgataacgcagtttgtccgggttgtactcgtcacgaccgataccacaaccaagcgcggtgataagcgtcgccacttcctgagaagagagcatcttatcgaagcgcgctttctcgacgttgaggattttacccttcagcggcagaatcgcctggttcttgcggttacgcccctgcttcgcagagccgcccgcggagtccccttccacaaggtacagttcggaaagcgccggatcgcgttcctggcagtctgccagtttgcccggcaggccagctaaatccagcgcacctttacggcgggtcatttcacgcgcgcgacgcgcagcttcacgggcacgggcagcatcgataattttgccgaccacgattttcgcgtcggttgggttttccagcaggtattccgccagcagttcgttcatctgctgttcaaccgccgatttcacctcagaagaaaccagtttgtctttggtctgtgaggagaatttcgggtccggcactttcacggaaacgaccgcaatcaggccttcacgcgcatcgtcaccggtggcgctgactttggcttttttgctgtagccttctttgtccatgtaggcgttcagggtgcgggtcatcgccgcacggaagcctgccaggtgagtaccgccgtcacgctgcggaatgttgttggtaaagcagtagatgttttcctggaagccatcgttccactgcaacgccacttcgacgccaataccgtctttttcggtggagaagtagaagatattcgggtggatcggcgttttgttcttgttcagatattcaacgaatgccttgatgccgccttcatagtggaagtggtcttctttgccatcgcgcttgtcgcgcagacgaatggaaacgccggagttgaggaacgacaactcacgcagacgtttcgccagaatgtcatattcgaactcggtcacattggtgaaggtttcaaggcttggccagaaacgcaccatagtgccggttttttcagtctcgccggtaaccgccagcggggcctgcggtacaccgtgttcgtagatctgacggtgaattttaccctcgcgctggataaccagctccagtttttgcgacagggcgtttactaccgaaacaccaacgccgtgcagaccgccggacactttataggagttatcgtcaaatttaccgcctgcgtgcagaacggtcatgatcacttccgccgccgatacgccctcttccgggtgaataccggtcggaatgccgcgcccgtcatcctgtacagagacagagttatcggcgtgaatggtgacgataatttctttacagtgacccgcgagcgcttcgtcgatagcgttatctaccacctcgaataccatgtggtgcagaccggtgccgtcatccgtgtcgccgatatacatacccgggcgcttacgcaccgcatccagccctttcaggactttgatactggaggagtcataagaattcgacatcaacgtttctcgctcatttatacttgggttaatccgttattttacccttttccacggtaaacatcttcgaattttcgtccgacatgtctataacgtgttcagcactgatcgcgctgacaaagacctgtgattgcgtcgcttttaagcggctggcaagcagcccgcgacgctcatcatcaagctcagaggcaaaatcatctatcaggtagagacaccgccgcccgctttcacgggtgaggaactctccttgcgccagacgtaaggcgcacatcaacagcttaagctgcccacgcgataaggtatcttccaccggcgcaccgtcggcgcgaatgcgtaagtccgctttatgcgggccgtgcgcggtgtaggttagctggcgatcgcgttcaaaattacgttccagcacctcagcgtactctgtctctttctcccagccgcgctggaaagagaaagtcagagaaaactcagggagaaattgcttacaggtatcagccatatcggctgcgataccggcgctatactccgcgcgccaggtgctgatttgctccgccagcgggatcagttctttatcccacgggcgtagctgttcgtaacgagtcacctggcgcagcgccgcattgcgctgcttgagcaatcgcttgagattgctccaggcggtgaaaaatccgggttcgttgtgaaagcatccccagtcgaggaatgctcttctgtatttggggccgccgttgagtaaagtaaacccttctggcgttatcagctgcattggcatcaggtgcgccagctccgcgactttatgcccgtctgtaccgtcaatacggactttgctgtcgccttgtttgtctttggttaaaccaatcgccgtctcgcgctcttcgccctgtaatcgcccgtggagaacaaacgcctcctgctcgtggcgaatgacgcgaccaatctgcaaactgcgaaacgcccgaccgtggccgagcgtatagatggcttccagcacgctggttttgccactgccgttggcacctaccagaaagttaaagccgggagataaggcgagatccgcggtttcaatgttgcggaaatcgcggatcaacaagcgggtgagggacattacagtctcattggcatgacaacataagccgcgctctggctggccgcatcttcaatctgcacgctggaaaccgaatcggtcagcatcatgcggacgttttcgcatttcagtgcgttcagaacatccagcacatagctgacgttgaagccgatttccatctccgcaccgctataggtaacgtcgaggatctcttccgcttcttcctgttctgggttgttggcggtgattttcagctggttttcgctgacatacagacgcacgccgcggaatttctcgttagagagaattgccgcacgggcaaacgcctgcttgagcagatcacagccagcttccagatgcttgtccgggttcttcggcagaacgcgacggtaatccgggaagcgaccatccaccagtttcgaggtgaagataaagtcgccaacgtgggcgcgaatgttgttgctgccaatctgcacgcgcagcggattgtcgccgccgtcgagcatacgcatcagttcaatcacgcctttacgcggcacgatcaccgaatggcttggcaaagattgaccaattggcattgaacagactgccagacggtggccgtcggtcgccacggtgcgcagttcttcaccttcggtttcaaacagcataccgtttaagtaatagcgaacgtcctgatgcgccatagaaaactgggtcgcttcaatcagacgcttcatcgtcgcctgcggcagggtaaattcgacttcgctctgccagtcatcgaggttcgggaaatctgccgctggcagggtagacagcgaaaaacggctacgcccggagcgcaccagcatccgctcaccttccagctgcacggcaatttccgcgccttcaggcagaccacggcagatatcaaagaatttgcgcgccggaacggtcgtcgcccctggttcgtgcggctgaaccagcgcaacgcgtgccaccatttccatctcgagatcagtaccggtcagcgacaacgtaccgtcagcaacctgtaacagcagattaccgagaatcggtagcgtaggacgaccacctaacggaccgctcacctgttgtagcggttttaataaatgctcacgttctacggtaaatttcataggtttacgatgacaatgttctgattaaattagaaaaatcttctttgatatcgtggctctcttcacgcaactgctcgatcttccggcaggcatgaagcaccgtcgtgtggtcacgaccaccaaaggcatcgccaatctccggaagactgtggttagtcagctctttcgccagcgccatcgccatctggcgcggacgggccaccgagcgggatcgacgcttggaaaggagatccgcgactttgatcttgtagtactccgccaccgtcttctgaatattgtcgatggtgaccagtttttcctgcaatgccagcaagtcacgcagcgcctcacgcacgaagtcgatggtgatcgcccgtccggtaaagttggcgttggcaatgacgcggttcagcgcgccttccaactcacgtacgttagatcgtagacgcttggcgataaagaacgccacttcgcccggcaaacgaatgtcgttttcgtcggcctttttcatcaggatcgccacgcgggtttccagctctggcggttcgatcgccacagtcagtccccagccgaagcgggatttcaaacgatcctcaacgccgttgatctctttcggatagcgatcggaggtgagaatgatctgttgattaccttccagcagggcgttgaaggtgtggaaaaactcttcctgagatcgttctttattagcaaaaaactgaatatcgtcgatcagcacgtgcatctacggaacggtagtagcgtttaaactcttcgatcgcgttgttttgcagggctttaaccatgtcctgaacaaagcgctcggagtgcatataaaccactttggcattcggcttgcgcgccataatgccgttacccaccgcatgcagcaggtgagttttacccaaacccgtgccgccataaaggaacaacgggttataagcaccgccagggttatctgccacctggcgagccgccgcgcgcgccagttggttagatttaccttcaacgaagttatcaaacgtgtgtttgacgtttacgttagaacgataggtcggttctgccggagccgggacgttatcccaacccgagcgcgtagaaggcgcagcacgttgcggctgcgtttgcgccacctgtgcaggggccgcgacgttgctcgtcactgccgcttgtggcgtttgcgtcaccggtttggtgccgacttcaaaacgcagctgtggggcatccgctccgcagaaactggttagcagtccattgatattattaaggtacttgtcccgtacccaatcgaggacaaaacggtttggcgcgtacagggccagcgtgttatcgctcagttccgcctgcaatgggcgtatccacatactgaattctgtggctggtaactcatcctgcaatcgggcaagacactgctgccaaagcgaaagtgacacggcggactccactcgaacaaaagtcgataatgactaaggctgaaacattcatgattgttgacgtacgtcgaaaagaccctgcatgagggtgacgcacgaaccgctgtctgcggttatatgcccgatcaagatcctgcaaaacgatcgggaccgcggatcatagcctaaactgcgcaatagatcttctgtttctcacagattttcccgatttatccacaggatgatccagaactcgctaagtgtaaacgatcctgccgcgggccgggcacgatttacgccgcatattggaaaatttaatgaccatagacaaaaattggcttaatcgatctaataaagatccagaacgatccttgcgctttacccgtcagcccgtataatcctccacccggcgcgccatgctggttttcactggtgtgaggccgtacgttttccccgcgaaaaggtgcggaaaagcgcggtaaataaggaaagagaattgactccggagtgtacaattattacaatccggcctctttaatcacccatggcttcggtgtccatcgtttcatttttcggcggatatccaataaagccattgaatttattcaagtttaggtagaaatcgccatgaaacgcacttttcaaccgtctgtactgaagcgcaaccgttctcacggcttccgtgctcgtatggctactaaaaatggtcgtcaggttctggcacgtcgtcgtgctaaaggccgcgctcgtctgaccgtttctaagtaataaagctaacccctgagtggttaagctcgcatttcccagggagttacgcttgttaactcccagtcaattcacattcgtcttccagcagccacaacgggctggcacgccgcaaattaccattctcggccgcctgaattcgctggggcatccccgtatcggtcttacagtcgccaagaaaaacgttcgacgcgcccatgaacgcaatcggattaaacgtctgacgcgtgaaagcttccgtctgcgccaacatgaactcccggctatggatttcgtggtggtggcgaaaaaaggggttgccgacctcgataaccgtgctctctcggaagcgttggaaaaattatggcgccgccactgtcgcctggctcgcgggtcctgatagccctcattcgggtctatcaacgcctgattagtccgctactcgggccgcattgtcgtttcactccaacctgttcaagctacggaattgaggcattgcgcaggtttggagtgataaaaggcagttggttgacggtgaaacgcgtattaaaatgccaccctttacaccctggtggtgacgatcccgtcccgcccggaccatttgataccagagaacactaacgatggattcgcaacgcaatcttttagtcatcgctttgctgttcgtgtctttcatgatctggcaagcctgggagcaggataaaaacccgcaacctcaggcccaacagaccacgcagacaacgaccaccgcagcgggtagcgccgccgaccagggcgtaccggccagtggccaggggaaactgatctcggttaagaccgacgtgcttgatctgaccatcaacacccgtggtggtgatgttgagcaagccctgctgcctgcttacccgaaagagctgaactctacccagccgttccagctgctggaaacttcaccgcagtttatttatcaggcacagagcggtctgaccggtcgtgatggcccggataacccggctaacggcccgcgtccgctgtataacgttgaaaaagacgcttatgtgctggctgaaggtcaaaacgaactgcaggtgccgatgacgtataccgacgcggcaggcaacacgtttaccaaaacgtttgtcctgaaacgtggtgattacgctgtcaacgtcaactacaacgtgcagaacgctggcgagaaaccgctggaaatctccacctttggtcagttgaagcaatccatcactctgccaccgcatctcgataccggaagcagcaacttcgcactgcacaccttccgtggtgcggcgtactccacgcctgacgagaagtacgagaaatacaagttcgataccattgccgataacgaaaacctgaacatctcttcgaaaggtggttgggtggcgatgctgcaacagtatttcgcgacggcgtggatcccgcataacgacggtaccaataacttctataccgctaatctgggtaacggcatcgccgctatcggctacaagtctcagccggtactggttcagcctggtcagactggcgcgatgaacagcaccctgtgggttggcccggaaatccaggacaaaatggcagctgttgctccgcacctggatctgaccgttgattacggttggttgtggttcatctctcagccgctgttcaaactgctgaaatggatccatagctttgtgggtaactggggcttctccattatcatcatcacctttatcgttcgtggcatcatgtacccgctgaccaaagcgcagtacacctccatggcgaagatgcgtatgctgcagccgaagattcaggcaatgcgtgagcgtctgggcgatgacaaacagcgcatcagccaggaaatgatggcgctgtacaaagctgagaaggttaacccgctgggcggctgcttcccgctgctgatccagatgccaatcttcctggcgttgtactacatgctgatgggttccgttgaactgcgtcaggcaccgtttgcactgtggatccacgacctgtctgcacaggacccgtactacatcctgccgatcctgatgggcgtaacgatgttcttcattcagaagatgtcgccgaccactgtgaccgacccgatgcagcagaagatcatgacctttatgccggtcatcttcactgtgttcttcctgtggttcccgtcaggtctggtgctgtactatatcgtcagcaacctggtaaccattattcagcagcagctgatttaccgtggtctggaaaaacgtggcctgcatagccgcgagaagaaaaaatcctgattcggtgagttttcgctaaaataagggcggtcagttgaccgccttttttcttttcgtagggcggataagcaccgcacatccgccacacaaagcaacaggaacatcatgagcgataatgacactatcgtagcccaggccacgcctccgggacgtggcggcgttggcatcctgcgcatctccggcctcaaagcccgtgaagttgccgaaaccgtgctgggtaaactgcctaagccacgctacgccgattatcttccgtttaaagacgccgatggcagcgtgctcgatcaggggattgcgctatggttccctggcccgaactcgttcaccggcgaagatgtgctggaactgcaaggtcatggcggtccggtgatcctcgacctgctgttaaaacgcattctgaccattcccggcctgcggattgcccgccctggtgagttttccgaacgcgcatttctgaacgataaactcgacttagcccaggccgaggcgattgcggaccttatcgacgccagctcggaacaggcggcccgttcggcgctaaactcgctgcaaggcgcgttctccgcacgggtcaaccatctggtggaagccctcacccacttgcgcatttacgtcgaagcggcaattgatttcccggatgaagagatcgatttcctctccgacggcaaaattgaagcccagctcaataacgtaattgccgatctcgacgcggtacgcgccgaagctcgtcagggtagtttgttgcgcgaagggatgaaagtggtgattgccggacgtcctaacgccggtaaatcgagcctgctgaacgcgctggcgggccgtgaagcagcaatcgtaaccgatatcgccggaaccacgcgtgacgtgctgcgtgagcatatccacattgacggaatgccgttgcatatcatcgataccgccgggcttcgtgaagccagtgacgaagttgaacgtattggtatcgagcgcgcatggcaggaaattgaacaggcagaccgcgtgctgtttatggtcgatggcaccacgacagacgccgttgatccggcagagatctggccggaatttatcgcccgtctgccagcgaaactgccgatcaccgtggtgcgcaataaagccgatatcaccggcgaaacgttggggatgagcgaagtgaacggtcatgcgttaattcgtctttcggcgcggactggcgaaggcgtggatgtactgcgtaaccatctcaaacagagcatgggctttgacaccaatatggaaggcggcttcctggcgcgtcgtcgtcacctacaggcgctggaacaggcggcagagcatttgcagcaaggtaaagcgcaactgttaggtgcctgggcgggtgaactgctggcggaagagttgcgcctggcacagcagaacttaagcgagatcaccggggaatttacttcagacgacctactggggcggattttctccagtttctgtatcggtaagtaaccgcgcttgcgaagccgcattctgactgtcagatgcggcttcgcttcattgttagcactcctgttattcctcaacccttttttaaacattaaaattcttacgtaatttataatctttaaaaaagatatttaatattgcgtcccgaacgattgtgattcgattcacatttaaacaatttcagaatagacaaattccttgagtattatactgtagcctcgtgtctttcgaggataagtgcattatgaatatcttacatatatgtgtgacctcaaaatggtttaatattgacaacaagattgtcgatcaccgcccttgatttgcccttctgtagccatcaccagagccaaaccgattagattcaatgtgatctatttgtttgctatattttaattttgccttttacaaaggccatctctcgtttatttacttgttttagtaaatgatggtgcttgcatatatatctggcgaattaatagatattgcaaatgtaatattcacagggatcactgtaattaaaataaatgaaggattatgtaatggaaaactttaaacatctccctgaaccgttccgcattcgtgttattgagccagtaaaacgtaccactcgcgcttatcgtgaagaggcaattattaaatccggcatgaacccgttcctgctggatagcgaagatgtgtttatcgatttactgaccgacagcggcaccggggcggtgacgcagagtatgcaggccgcgatgatgcgcggcgacgaagcttacagcggcagccgcagctactacgcgttagccgagtcagtgaaaaatatctttggttatcaatacactattccgactcaccagggccgtggtgcagagcaaatctatattccggtactgattaaaaaacgcgagcaggaaaaaggcctggatcgcagcaaaatggtggcgttctctaactatttctttgataccacgcagggccatagccagattaacggctgtaccgtgcgtaacgtctatatcaaagaagccttcgatactggcgtgcgttacgactttaaaggcaactttgaccttgagggattagaacgcggtattgaagaagttggcccgaataacgtgccgtatatcgttgcaaccatcaccagtaactccgcaggtggtcagccggtttcactggcaaacttaaaagtgatgtacagcatcgcgaagaaatacgatattccggtggtcatggactccgcacgctttgccgaaaacgcctatttcatcaagcagcgtgaagcagaatacaaagactggaccatcgagcagatcacccgcgaaacctacaaatatgccgatatgctggcgatgtccgccaagaaagatgcgatggtgccgatgggcggcctgctgtgcatgaaagacgacagcttctttgatgtgtataccgaatgcagaaccctttgcgtggtgcaggaaggcttcccgacatatggcggcctggaaggcggcgctatggagcgtctggcggtaggtctgtatgacggcatgaatctggactggctggcttatcgtatcgcacaggtgcagtatctggtcgatggtctggaagagattggcgttgtctgtcagcaggcgggcggtcacgcggcattcgttgatgcaggtaaactgttgccgcatatcccggcagatcagttcccggcacaggcgctggcctgcgagctgtataaagtcgccggtatccgtgcggtagaaattggctctttcctgttaggccgcgatccgaaaaccggtaaacaactgccatgcccggctgaactgctgcgtttaaccattccgcgcgcaacatatactcaaacacatatggacttcattattgaagcctttaaacatgtgaaagagaacgcggcgaatattaaagggttaacctttacctacgaaccgaaagtattgcgtcacttcaccgcaaaactgaaagaagtttaattaaaacactcagagtggctataaggatgttagccactctattaccctacatcctcaataacaaaaatagccttcctctaaaggtggcatcatgactgatcaatcagaaaaaaaacactctgcattttggggtgttatggttatagccggtacagtaattggcggtgggatgtttgctttacctgttgaccttgccggagcctggtttttttggggcgcttttattcttattatcgcctggttttcaatgttacattcagggctattattattagaagcaaacttaaattatcccgtcggttccagttttaacaccatcaccaaagatttaatcggtaacacctggaacattatcagcggtattaccgttgccttcgttctctatatcctcacttatgcctatatctctgctaatggtgcgatcattagtgaaacgatatcaatgaatttgggctatcacgctaatccacgtattgtcgggatctgcactgccattttcgttgccagcgtattgtggataagttcgttagccgccagtcgtattacctcattgttccttgggctgaagattatctcctttgtaattgtttttggttctttcttcttccaggtcgattactccattctgcgcgattccaccagcaccactgcggggacgtcttacttcccgtatatctttatggctttgccggtgtgtctggcgtcatttggtttccacggcaatattcccagcctgattatttgctatggaaaacgcaaagataagctcatcaaaagcgtggtcttcggttcgctgctggcgctggtaatttatctcttctggctctattgcacgatggggaatatcccgcgagaaagctttaaggcgataatctcctcaggcggcaacgttgattcgctggtgaaatcgttcctcggcaccaaacagcacgggattatcgagttttgcctgctggtgttctccaacttagctgttgccagttcgttctttggtgtcacgctggggttgttcgattatctggcggatctgtttaagattgataactcccacggcgggcgtttcaaaaccgtgctgttaaccttcctgccacctgctttgttgtatctgatcttcccgaacggcttcatttacgggatcggcggtgccggactgtgcgccaccatctgggcggtaataattcctgctgtactggcaatcaaagcccgcaagaagtttcccaatcagatgttcacggtctggggcggcaatcttattccggcgattgtcattctctttggcataaccgtaattttatgctggttcggtaacgtctttaacgtgttacctaaatttggctaaatccttcaggaagccagccattcgctggcttcttgcctgtcaggaaatcacttatgtccaaatggcaactcgcctgattctccttcaccacgtatgctttgcgtcaccttactatcaggacgctttagcccatgtcccgctttttgatttgtagttttgccctggttttactttatcccgcagggattgatatgtacctcgttggtttaccgcgcatcgccgccgatctcaatgccagcgaagcgcagttgcatattgcgttctccgtttatctggcggggatggcggctgcgatgttatttgccggtaaagtggccgatcgttcagggagaaagcctgtcgccatacccggcgcggcgctatttattatcgcctcggtgttctgttcactggctgaaaccagcgcgttatttcttgcagggcgatttctacagggactgggcgcgggctgttgttacgtagtggcgtttgccattttgcgcgacacgctggatgatcgacgtcgggctaaagtgctgtcgttactcaacggcattacctgcatcattccggtgttagcgccagtgctcggacatctgattatgcttaacttcccatggcagagtctgttctggacgatggcaataatgggtgtcgcggtactgatgttgtctttgtttattttaaaagaaacgcgccctgcggcccccgcagcttcggacaaaccacgagaaaatagcgagtcactgcttaaccggtttttcctcagccgtgttgttatcaccaccctcagcgtttcggtgatcctcaccttcgtcaacacgtcgccagtattgctgatggaaatcatgggttttgagcgcggagaatacgccaccattatggcgttgaccgctggcgtcagcatgaccgtttcattctccacgccgtttgcgctgggaatttttaagccacgtacgttgatgatcacctcacaggtgttattcctggcggcggggatcacccttgccgtttcaccttcccatgcggtttcgctgtttggtatcacgctgatttgcgccggtttctcggtaggttttggtgtggcgatgagtcaggcgttagggccgttttcattacgcgcgggcgtagccagctcgaccttaggtattgcgcaagtttgcggttcgtcactgtggatttggctggcggcggtggttggtatcggcgcatggaatatgctgatcgggattctgattgcctgtagcatagtaagcctgttgctgattatgttcgtcgcgcctggacgcccggttgccgctcatgaagaaatccatcaccacgcttgatctcaatctgctgctctgtctgcaactgctgatgcaggagcgcagcgtgaccaaagcggcgaagcggatgaacgtgaccccttcggcggtgagtaagtcgctggcaaagttaagagcgtggtttgacgacccgctctttgtgaactcaccgctggggctgtcgcccacaccgctaatggtcagcatggagcaaaatctggcggagtggatgcaaatgagcaacctgctgctggataaaccgcaccaccagacaccgcgcggcctgaagtttgagctggcagcagaatcaccgctaatgatgatcatgcttaatgcgctgtcgaaacggatctaccaacgttacccgcaggcgaccatcaaattacgtaactgggattacgattccttagatgccattactcgtggtgaagtggatattggtttttccggtcgcgaaagtcatccccgttcgcgggagctgttaagctcgctaccgttagccattgattatgaagtgctgtttagtgatgtgccctgcgtctggttacgcaaagatcatccggcactgcatgaagcatggaatctggacacctttttacgttatccgcatatcagcatttgctgggaacagagcgatacctgggcgctggacaatgtgttacaggagctggggcgcgaacgcacgattgctatgagcctgccggaattcgagcagtcactgtttatggcagcacagcccgacaatctgctactggcgaccgcgccgcgctactgccagtactacaatcaactccaccaactgccgttggttgctcttcctctcccgtttgatgaaagccagcaaaaaaagctggaagtcccttttacccttctgtggcataaacggaacagccgtaatccgaagatcgtctggttacgggaaaccattaaaaatctttacgcgtcgatggcataaccgaatcgtatgaaacgcgacccaatttcacaatgaaatgtaaaaaagttgtaataaacttatctgaatcgaacttttagccgctttagtctgtccatcattccagtaaatgattactcttgtattcataatggaccattaagcatggagcgaaaaatggcgactcactttgcccgagggattttaacggaaggacatctgatttctgttcgtctcccctcccagtgtcatcaagaagcccgaaacattccccctcatcgtcaaagccgttttctggcgtccagaggtttactcgcagaactgatgttcatgctgtatggcattggcgaattgccggaaatcgtcaccctgccgaaaggaaaaccggttttcagcgataaaaatttgccttcgttttctatttcctatgccggaaatatggtcggcgtggcgttaacaaccgaaggtgaatgtggcctcgatatggaactacagcgtgcgacacgcgggtttcatagcccacacgcgcccgataaccacaccttttccagcaatgaatcgctatggatcagtaaacaaaacgatcctaacgaagcgcgggcgcagctcatcacgctgcgccgaagcgtgctaaaactaaccggtgatgttttgaatgacgatccgcgcgatctgcaactactgcccattgccggacgcctgaaatgtgctcatgtaaatcatgtagaagcgttatgcgacgcggaggacgtgctggtgtggtccgtggcggtcacgcccacgattgaaaagctcagtgtctgggagttagatggcaaacacggctggaaaagcctgcccgatattcacagccgcgccaacaatcctaccagccggatgatgcgttttgcccagctctctaccgtgaaggctttttcgccaaattgatagacaaccacaggagtcatcatgtctgaaaaattgcaggtggttacgttactggggagcctgcgcaaaggctcatttaatggcatggttgcacgtaccctgccgaaaattgctccggcgagcatggaagtcaatgcgttaccttccattgccgacattcccctgtatgacgctgacgtacagcaggaagacggttttccagcaacagttgaagctctggcggaacagatccgtcaggctgacggtgtggtaatcgtcacgccggaatataactactcggtaccgggtgggctgaaaaatgccatcgactggctttcccgcctgccggatcaaccgctggcaggtaaaccggtattgattcagaccagctcaatgggcgtgattggcggcgcgcgctgtcagtatcacctgcgccagattctggttttcctcgatgcaatggtgatgaacaagccagaatttatgggcggcgtgattcagaacaaagttgatccgcaaaccggggaagtgattgatcagagtacgctggaccacctgaccgggcaattgaccgcatttggtgagtttattcagcgagttaagatctaaataaaaaacccgccagcaatcatgcatggcgggtttttaacgcgctatcgattttagtgagcgtcgataaagacaatcttcaggataaacagcagcgcaacgatgattacgcacgggctaaggtcacgcagacgtccggtaccaatcttcatcacgcagtaggagataaagcccagcgcgataccttcagtaatcgagaagctgaacggcatcatcacagcggtaataaacgccggaacagattcagtaagatcctgccagttcacgcgagcaagacttgaggtcatcaacacgccaacgtaaatcagcgcaccagctgcagcgtagcctggcaccatccccgccaacggcgacaggaagataaccagcaggaacagcaaaccaacaaccactgccgtcagaccggtacgaccgccaacggaaacgccggaagaagattcaatatacgccgtaacagaagaagtaccgataaacgaaccggtcaccgaagagatactgtcgacatacagcgcctgcttcatgcgcgggaatttacctttctcatcagccagacctgctttatcggtcacgccaatcagcgtaccggaggagtcaaacaagttgaccagcatgaaagagaaaatcacccctgccagcccaaggttaaacgacccggctaaatctacatgacccacgacactcattacactcggcggcgcagaaacgatgccattatagtggacatcacccagcatccagcccagcagcgttgtcaccacgatggaaaccagcaccgccgcgtgaatattgcgcgaggccagaatggcgatgatgaagaagccgaggatccccagcagcacgctgtgagaagtcagattaccgatgctcaccagcgtttccgggttagcgacaatcacacctgcgtttttcagccccatcatgccaataaacagaccgataccactggtgatgccaacacgtagacttaccgggatgttggctatcatccagtagcgaacgcggaaaatcgtcagtaacagcagaccaatcgcaccccagaagattgcgcccatcccgacttgccacggcaagcccatcgcctgtacaacgacaaaagcgaagaacgcattcaggcccattgccggtgccagtgcaactggcaggttagcaaacagccccatcataatactgccgaatgcagcaatcagacaggtcgtgacgaagacggcgctggtatccatgccagcaacgccaagaatttgcgggttaacaaaaacgatgtaaaccatcgtcaggaaggtggtaaaaccggcgatcacttcggtccgtgccgtcgtgccatgttcgcgcagtttaaacacgcgttccagcatcccctggccagaagcctgggttgtgtgttgttgactcattatctatttccgaacaaggagggaaaatccgtcgctatcgtataccaaaatgagacaatatggacggctgaagataactttttttcattgtatttgcttatacggcaacgattgcgtcatgcgaattggcatgacgaaaacgttaaactaacgataaaggaaagacatgtcccagatagaagcggtatttttcgactgcgacggtacgctggtcgatagcgaggtcatttgctctcgcgcctatgtcacgatgttcagggaatttggcattcacgttgacctggaagagatttttacccgttttaaaggcgtaaaactctacgaaatcatcgacatcatcagtaaagaacagggcgtgacgatggtccaggccgatgccgagcacgtttaccgcgcagaagtagcacgtctgtttgataccgaacttgaggacatcgcaggagcgaacgaattgctggcaagcattaacgtgccgatgtgcgtcgtctctaacggtccggtcagcaaaatgcagcattcgcttggtaagctcaacatgctgcactacttcccggaaaaactgttcagcggctatgatatccagcgttggaagcccgatccggcattaatgttccatgcggcaaaagcgatgaatgtgaacgttgaaaactgcattctggtcgatgactccagcgccggtgcgcaatcagggatagatgccggaatggaagtgttttacttctgcgctgacccgcacaataaaccgatcgttcacccgaaagtcaccacctttacccatctttcgcaattaccggaactgtggaaggcgcgtggttgggatattacggcatagttattcacactcccttcacttactccacttaaattggcacgcaaaggtaagtaaagggagtttgatatgtctgtttcacgtcgggtaattcatcacggactgtattttgcggttttagggccgttaattggtgttctgtttcttgtcctctacatattcttcgcaaaagaaccgctgattcttttggtaataatacaggtacttccattgtttatcttattgtcgataactacgggagctattcctgcaatgttaactggcgtaatggtcgcctgtctgccggaaaagatcgggtcacagaaacgttatcgttgtctggttggcggcataggtggagtcgttatcaccgagatctattgcgctgttatcgtacatattaaggacatggcttcctcagcgttatttgaaaacattctttctggtgaaaatctcgttgtccgcatcatcccagcattgctggcaggcgtggtgatgagcagaatcattacacatctacccggattggatatttcatgtcctgaaacagactctttaagctaagcggaatgctttatctatttgtcattaaatgttggagaacaggccggagcgtaattcacacatccggccttatttttaatcttaaccgagcgctaattctgcggcagcggctttatcagcgattaccatcagcgaaggatgcagctgcaacacggaagcaggaacatcttcggtaaccgggccttgcagaacatttttcagtgcctgcgctttacctgcgccactgacaattatcagcaagtttttcgccgccatgatgcttttcggccccatcgtcacgtagctgtcaggcactaatgaaaagtcgccgcccaactcgccatgcgccacaatatcaaccatctctccctggatcgggaactccacggtttgctcatggaaatgggtcgtatttggcagattgccacaaaaatgaccatctacacctaatcccaacaccaccaaatccaggccgccttcacgcgccagtttctgatcatgctcgcggtagttatcaatagtgagcttctggatattctcttctttgatccctgcaggggtgaaaaacagattacgcagattggtaatcgttacgccttccccttctttaccgcgaaatggaatttcatcgaaattgtagaaatagcagttatcgtaccagggcttacctttaaccagagtgatgagatattcgtacatgcctttgggcgtgctaccggcggtaattgccaggttaacgcgacgcatctttgacatataaccaagcagatgatgtgccgcgacacggctcatttcctggtaatcttcggtaatgatcaatttcatcttaatgccttattttatttaaataatttctgtacgaaggctgcataggcaggccgccagacatccatttcatggttcagacccggatattcctggtaatcaaacttaatttttttctgctcaagctcagttttcagcccggcgatatccttgccggttacgacatctttatcgcccacgaccacagtaaaattacgtagttgctggttaatagctgccggctcgttcagccgggcagcgaccccttcatctggtacggtcgtcgtggtaacaccactgaatgtggccagccagccaaagctttccagatgattcattcccgataccagtgcctgatacccaccttgtgaaagccctgccagtgcgcgaccatcggcatctttacggacattaaaacgcttgctaatcagcgggataatatcgttcatcagttcgcgatctgccgctttagcatttaacggataaaagactttacgtctctcctgaggaacgaaatcttcgggaataatgcccttcgcatcggtttcggtatccgggatcaccaccagcatcggtttaattttcccttcagccagcaggttatccatgatttgcgggatacgcccctgatcaatagcggaacgtccggtatcaccaaagccgtgatagaaatagagcactggcaaaggctcgcctatgccggtgtatcctggcggggtccagacatacatctgacgttcggattgcaatgcgttggagtggtaagttatggcgatcaaatcaccatgcacaacagaacgtgtatccagataactgcccggtaccagaatcatactggagttaacctggcgctgaggcttagtcattgctgtacctgtatcaatgctgcgtacaccatcaacattgaaaaaatactcgtacaggttgcctttcagaacaggcgtgcgccacgaccagactcccgcttcatctttagtcatcgggtgaatattgtccggaaccggaacacccaccactacggagacattttttgccccaggggcaaagtagcgaaaggtcacgctgttatcggtattgacctgagtcacatactgtttcaccggaatagtgggtgccgggctggctggcatatccgctgctatggcccattgagcagaaataccgctggcaatagccagcgttaaagcagcaatttttatattcatcgtaatattccttttattaagttccattaccaccagatttcagcctgggcaccgacagcaaactggtcgtctttattgtcttcaaaggtgaagccatccagttcattttccagagctttgatatacgtagcgtagaaacgaatttccgggcgcgaggtcaacatactggtattgactttaaaggtatggaagagcgtggttttataaccagattcattatatttattgctattcgcatctttgttttgctgggtgaaatagcccagttcaacacctgtctggttatattggtcccaaatataggccgggcgaacaaccgcacgaatagattcgaaatcagaatgtgcgcctgtttcgtagctataaatatcgttaccgaaggagtaaacaatcgcgttagccacaataaaatgatcgccgatataagcttcgccctgcgaagtcagacgaactgcagttccgcctgtatgatcaccataataacgaccattaaaggtagtaaatggacttgcaccagcataacgaccaaagttactggcgatagagttattcgcaaccaggaaggagaattcgttgaagccacccttatcaaatttctgcgttaaagatgtaccaaacatccaggtttctttccagtcataatacccgttattatcctgattatctttttccgatgcgctttcatttgctgagacataacgaccgctcaccattaaggtggctttatcccataacgggatatctttatagcgtaaatcaatggtattggtattaatctgctgtttgttttgcaggctgcgatcgtaatcatcgacatcttcacgaaccagcgcgatatcaattttacccggaccgactttccagttttccagacctacacctgcggcagcatcggtacgctgcgttttccagtcaagcatctggatttcaattttcggcgcaccgtgtttacccacccagaaatcagcctctggcgcaaagggcaggaaacctttggtggtaacgtacatatcagagaactgcataaagttctcaccaccggcgttatcgccaaaccagccagtagagtactgctgacccacgttaccatccatcatcacgatggcatcaacccgtttgccgttttcgttgtagacacgttgttttaactgcaaatcaaaccagccggagtattcgttaccaaagcggcccagagaaccaattgcccatgatttaggtgaaccatgagaggctgttccccaaccagaacggtagtagccgttgtaactaaagccgatttcatctttcacaaatttactgaaatctttcagagtcatggaagaataaatcgagcctgtctcactggcatttttctcttcatttttaaccagtacagcatcaggctttgcggcacgactggtcgggaatggattggcggcatacccttgatcattcgtacttacgctacgattcaccgtcgctggcgtatactttttcttctcttcatctttatattttttcagttcgctttgcgtttctcttaacgccttttctaatagctcaaggcgttgttccactgttaatgattcagccaatgattgtgcggaaaaggctaacggtgccattaataagatggcagaggtaataatatttcgtctaaacataatatccctttatggtgcaaagaaagaattaacgcatcgcatccagactgttctgaatgcgacgatatttaaggtgctttattggttatttttttaatgatagcccccgagttttgatcacttctgcataccatccgaagcttttcttgcgcgttcttgtgaggcttccttcaccattatcatcacgatccacataaataaagccgtagcgcttagacatttgtgaatgagatgcactgactaaatcaattggcccccaactggtgtaccccataatatccacaccatcggcaatcgcttcatttacctgtaccaggtgatcgtttaaataggcaattcgataatcgtcctgtatcgaaccatccgcttcaacgctgtcttttgcgcctaatccgttctcgacaataaataacggtttttgataacgatcccaaagtttatttaacagaacccgtaatccaaccggatcaatttgccacccccactctgaacttttcagatgcggattggggatcatattcagtatgttgccctgcgcatttttattaatgctttcgtcgtgggaaacacaaccggtcatgtaataactaaaagagatgaaatctacggtatgttttaaatcttctgcgtcactttcagtcatctcaatggtgatattgtggtcgcggaagaaacgctgcatatagccgggatactgaccacgcgcctgaacatcaccaaagaacatccagcgccggttctcttccatggcctgcaacatatcctgtggctggcaggtgagggggtaaaccagcccaccgagaagcatattgccaattttcgcttcggggatcaggctatgacaggctttaactgcccgcgcactggcaaccagttgatgatggatcgcctgataaacttccgcctcgccactctcttctgccagccccacgcccgtgaatggcgcgtgtaatgacatgttgatttcattaaatgtcagccataacgcaactttatgttggtagcgggtaaagaccgtgcgtgcgtaatgctcgaagtgatcgatgaccgcccgattagcccaaccgccgtagtttttcaccagcccatatggcatttcgtaatgggataacgttaccagcggcttgatccccgcctgcgccatttcatcaaacagccgctcgtaaaacgctaaccccgcttcattcggttcggcttcatcgccctgaggaaaaattcgcgcccaggcaatggaaatacgcagacaggtgaagcccatctcggcaaataacgcgatatcttccgggtaacggtgataaaaatcgatggcgacatctttgatattctctttccccaggatgcgcggttccatttttcccattacgccatgaggctgtaaatctgaggtcgtgatccctttgccatcttcctgccaggcgccttccacctgattggcagctgttgcaccaccccaaagaaatgtttctggaaatgctttcataattaactccttttatcgttagcgaatgatggataacagcggctcaccagcgtttatctgcgccgtgccgtggggtaatacgtccgtaaaatcatcgctattactgattaataccggcgtcgtcagatcaaatccggcctcgcgaatagcagggatatcaaaagaaatcagccgatcgcctgtattgaccttgtcacccacgttgacgtgagcggaaaagaatttgccgtccagttttacggtatcgataccgacatgaatcaggatctccacaccatcatctgactcaatgccaatggcgtgtaatgtggcgaacaacgaagcaattcgacctgccaccggagaacgcacttcaccaaccgagggcataatggcaatacctttacccaacaggccgctggcaaacgtggtatcagcgacgtgaatgagcggcacaatctctcccgtcatcggtgaacagataccgccctgctcaggtgtaataacctctggtgttttctcttgctgggcaacttgcgctgactgacgtttagcggtgatgaaatgaagcattaccgtaccgacaaatgcgcaaccgatggcaatgacaccaccaataacgctggcccatacggtgaaatcaatccccgttgacgggatggtttgcatgaaggtgaaaatacctggcaaaccaaaggagtaaactttcgtttgcgcgtagccaatgatggtggcccccaatgccccacttatgcaggcgataacgaaggggtacttacgcggcagattgacgccatataccgctggttcggtgataccaaacaaacctgtcaacgccgctgatcccgccaccacttttttctgtgcatcgcgttcgcagaggaagacgccgagcgccgccccgacttgcgccataatggcgggcattaacagcgggatcatggtgtcgtagcccagcacggtgaagttattgataattaaaggtatcaaaccccaatgcagaccgaacatcacaaagatttgccagaagccgcccattaccgcgcctgcaaatgcaggaaccgcctgataaagccagagataaccggcagcaatcagttcacttatccaggttgatagcggccccaccagcagaaatgtgatgggcgtgatgaccatcagacatagcaagggtgtgaagaaatttttgattgccgaaggtaaccatgcattaagtcggcgttccagaatgctgcacaaccaggcagaaaaaataatgggaataaccgatgacgagtaattcaacaatgtgaccggaatacccaggaaatccaggcccagcgcatccactttttgcccgttctcgaaggcagtcagaattaatggatgcactaacgctccgccaatcaccatggcagtaaatggattgccgctgaagcgtttccctgcggtgtagcccaggattatcgggaagaaccaaaacaaggcatcactggcgctaaataaaattaaataagtaccactttgttcggtcgtccactgaaaagtgagtgccagagccaacatacctttcaggatcccggttgccgccatcaaaccgatcagaggcgtaaaaatacctgaaataacataaacaaagcggtttaacagattacctttatcatcattttccggtgcctgttgcgctttttcgccaaggcctgccacgctgttaaccgccaggaagacatcggccacatggttacctatgacaacctgaaactggccaccgctttccaccaccataataataccgggggtctttttcagtacctcagcttgcgctttgctttcatcctttaacttaaaacgtaatcgcgttgcacaatgcatcagactcacaatgttatctgcgcccccgactcctgcgactattgttctggctaactccgtcataacttgccctctaccgctttgcggcaaaactccaaaaaaaaacctgaaaaaaacggcctgacgtgaatcaagcaatttttttcaggttttgcccgcttagtgcggtaacaatcctttattcagtaataatatttcagtgttctttgcgcacgcgctctatatttatggctaaaaacataatctctgcaggtgagattttacgttgatactgcaaaccaataaaaatggcgatccgctccgcacattgccatgcttgcgggtaattttgctttactgcttgttgtaatgattcatcactatcgttaatcgatgcatgttcaataatacgccaggataaaaatttcagatgcgtaaccagtcgctgataactcaagctttcttcctggtaattaaggctgaactgaaattttattaattgcagcatttctcgcattaattgcgtgacacctgcaacatcctccatatttccgctcatttgggcactgaccagatgcatggcaataaagcccacttcatctttcggtaactgcacgcccaaccgtttatcaataatggttaacgcttcttcccctagctggaactctttcgggtaaagtcgctggatatcccacagcagcgggttgggcagtagcacgttttgctgaaagcgtttaatcgcaaactggcaatggtcagttagcgagatataaatactgtcctgcaactttcccagacgctcctgcgccagagagataatacgatcacaggttgccatcacctcaagaggcatatgacttaagagttcgcttaatcgcccgttcagttcatgactgctcaaggcatactctttttctattccacttgagttaattctttcgcctgggcgtttttgaaagccaattccgcgccccatgacgactttttcccgctgttgatcatcaataaccaccacaacattattgttgagaattttggtgatttgcatgttcatagcaaggaccttttttataaacaaaaaaacccgacttcaccagtattctctggttatgtcaggttttgcctgcgaatgcagtaacaatccagtcattaattaatggtttttataacgaacatccaggttcgaaaattaatttagttgcgtgcagaaaaaatagcaatgctctatttataaaagtatgaccatgctcgcagttattaattttgtgtaattttaggattttataaagttatatataacaaatcccaataattaaattattgggatttacttggtgaattatttatcgctatctttttctgccagcagtttatcgagctcgtcaccaccgacgtgacggaaatcctgccccttcacgtagtagaagataaactcacaaatattctggcagcggtcgccaatacgttcgatagaacgcgcacagaataacgcggtaagtacgctcggaatggtacgcgaatcttccatcatgtaggtcatcagttgacgaacaataccttcgtactcctgatcgacttttttatcttcacgataaatacgtaccgcttcgtcaatgtccatccgcgcgaacgcgtccagcacgtcgtgcagcatttggatggtatgacggcccagcgactccagacttaccagcaatggctgatgctgctgggagaatttctccagtgcagtacggcagattttgtccgccacgtcgccaatacgctccagctcggcaatggttttactgatcaccataaccagacgcaggtcgctcgccgtcggctgacgtttggcgataatgcgcacgcaggcttcatcgatcgccacttccatcatgttgacgttcttgtcgccttcgatgacgcgcttcgccagatcgctgtcctggttatgcatcgcggtgattgcatcagaaagctgctgctccaccatgccgcccatggtcatcacctgcgtgcggatgctttccagttcggcgttgaactggccggaaatatgtttattaagattgagactgtccataacgcactcctgaatcaaccgtaacgaccggtgatgtagtcttctgtttgtttcttcgctggcttggtgaacagatcgtccgtgttgctgaactcaatcaattcgcccaggtacataaacgccgtgtggtcggaacaacgcgcagcctgctgcatgttgtgggtgacgatcaccacggtgtaatcctgcttcagttcggtgatcagctcttcaatacgcccggtagagatagggtcgagtgccgaacacggttcgtcgagcagcagcacttccgggcgaatggcgataccacgcgcaatgcacagacgctgttgctgaccaccagagagagagtaaccgctctggtgcaatttatctttggtttcgttccacaatgcggctttggtcaatgcccactgcacgcgctcgtccatgtcagcacgggagagcttctcaaacagacgcacgccaaaagcgatgttgtcgtagatggacattgggaacggcgtcggtttctggaacaccatgcccactttcgcacgcagcagggcgatatcctgagagttggtcaggatgttgtcgccatcaagcagaatttcaccttccgcacgctgttccgggtacagttcaaacattttgttgaaggtacgcagcagcgtcgatttaccgcagccggacggcccgataaacgccgtaacctggtttttggcgatatccaggttgatgtttttcagggcatggaatttgccgtagtagaagttcaaattacgaacctgaattttactcggggcagtttcaaccatactcattgcaatcttttcctcatcgtgcctgatgcacttcgcgaatcaggcttaccgtaggccggataaggcgtttacgccgcatccagcaaagtgttaaccgtgtttattcttcgcaaaaacaacgcgcgccagaatgttcagcagcagtacgcacagggtaatgatcaacaccccggcccaggccagttgctgccattccgcaaacgggctcatcgcaaacttaaagatcgtcaccggcaggttagcgatcggctgcatcatgtccgtgctccagaactggttggagagcgcagtaaacagcagcggtgcggtttcaccagcaatacgggcaatcgccagcaggataccggtcatgatcccggacaccgacgctttcagcgtgatcgcggcgatcatcttccacttcggcgtacccagcgcataagccgcttcacgcaggctgtccggcaccagtttcagcatgttctcggtggtgcggataacaatcggcacctgcaacagcgccagcgcaatcacgcccgcccagccggagaagtgctccatctgcgccaccacgatggtgtaaacaaaaagaccaaccacaatcgacggtgcggagagcaaaatgtcgttaatgaagcgaatcacttctgccagccaggatttacgaccatattcagccagataaatccccgccataatgcccagcggcgtaccgaataccgtggcccacaaaattaacaggccgctacccgccagggcgttcgccagaccaccgccttccgtatttggcggcggcgtcatttcggtgaacagcgccagcgacataccatcgataccgcgagtgatggtggacattaaaatccagatcagccagaacagaccgaaggccatcgtcgccatcgagagcgtcagcgcaatacggttcttaaggcggcgacgcgcctgcattttacggcgggattcagccagcgccgcagtggtttgcatttcaaccatagccattagcgtgccccctcattcttagccaggcgcataatcataaacttcgatgcggcgaggacgatgaaggtaatcacaaacaggatcaggcccagttccatcagtgcagcaacgtgcagacccgactctgcttccgcaaattcgttggccagcgcagaggtgatactgttgcccggcatatacagcgaggcgctgtcgagttggtaggtgttaccgatgataaaggtcaccgccatggtttcaccgagcgcgcgccccagccccaacataatgccgccgataaccccatttttggtgaacggaagaacgatacgccagataacttcccaggtggtgcagccaataccgtaggccgactctttcatcatcaccggggtttgttcgaatacatcgcgcattaccgctgcaatgtacggaataatcatgatggcgaggatcacgcctgccgcgaggataccgataccaaaggccgggccggagaacagcgcgccgacaatcgggatattcgacatgatattgccgaccggctcctggaagtaaacggcgaacagcggggcgaagataaacaagccccacatgccgtaaacgatacttggaatggcagccagcagctcaatggcgatacccagcgggcgtttcagccagccaggcgcaagctcggtcaggaacagggcgataccaaaactcaccgggacggcgatcagcagcgcgataaacgaggtcaccagcgtaccgtagatcggcaccagcgccccgtagatatcgttcggcgcatcccactctttggtccacaggaaagccagaccaaatttctgaatgctcggccaggaggagatgatcagagagacaataatgccacccaacatcaatagcacaatcagcgccgccagttttaccagcacgctgaaaattatgtcgccctttttacccggtgggttaaaagcaggcttggttgcagccataagttactcttcagttaaacgcgtttacaaagtcattttgtaatgccggatgcggcgtaaaacaccgtacccggcctggagttttattagtacagcggcttgccgctactgtctttaatattggtcttccacgcagcgcgaacctgttcaactacgctatccggcaggctggcataatccaggtcgttcgcctgtttagccccggttttgtatgcccagtcgaagaacttcagcacttcagtgccttgttctggtttcttctgatctttatggatcagaatgaacgtggtagaggtaataggccatgcatcttcgcctttctggttggtcagatcctgagcgaatgttttgctccagtctgcgccttttgctgcattagcgaagttttcttcggtcggactcaccggtttgccatcagcggagatcagtttggtgtacgccaggttgttctgcttcgcgtaagcatattcaacgtaaccaactgcacccggcagacgctgaacgaacgcggcgataccgtcgttacctttaccgcccagaccgatcggccattttacggtagagccagtaccaacgttgtttttccactcttcgttcactttcgccaggtagctggtgaagacgaaggaagtcccggagccatctgcgcggcgtactacagcaatgttctgtgaaggcagtttcagacccggattcagtttggcgatggcttcatcatcccacttcttgattttgcccaggtagatgtcgccgagggttttaccatccagcaccagttcgccagacttcagacctggaatattaaccgccagcaccacgccgccaatcacggtcgggaactggaacaggccttcctgagccagtttttcgtcagacagcggcgcgtcagaagcaccaaaatcaacggtattggcgatgatctgttttacaccaccagaagaaccgataccctggtagttaactttattaccggtttctttctggtaagtgtcagcccatttggcatacaccggcgcagggaaggttgcacctgcacctgtcaggcttgcttctgcaaacacagagaaagcgctcatcgataaggtcgcggcgacaacagttgcgacggtggtacgcataactttcataatgtctcctgggaggattcataaagcattgtttgttggctacgagaagcaaaataggacaaacaggtgacagttatatgtaaggtttatgacagttttatgacagagagagaatgtcttcagtctgatttaaataagcgttgatattcagttaattacaaatattaataacgaagagatgacagaaaaattttcattctgtgacagagaaaaagtagccgaagatgacggtttgtcacatggagttggcaggatgtttgattaaaaacataacaggaagaaaaatgccccgcttacgcagggcatccatttattactcaaccgttaccgattttgccaggttacgcggctggtcaacgtcggtgcctttgatcagcgcaacgtggtaagccagtagttgcagcggaacggtgtagaagattggtgcaatcacctcttccacatgcggcatctcgatgatgtgcatgttatcgctccccacaaaaccagcatcctgatcggcgaagacatacaactgaccgccacgcgcgcgaacttcttcaatgttggatttcagtttttccagcaattcgttgttcggtgcaacgacgataaccggcatatcggcatctatcagcgccagcggaccgtgtttcagttcgccagcagcgtaggcttcagcgtgaatgtaagagatctctttcagcttcaatgcaccttccagcgcgattgggtactgatcgccacggcccaggaacagcgcgtgatgtttgtcagagaaatcttctgccagcgcttcaatgcgtttgtcctgagacagcatctgctcaatacggctcggcagcgcctgcagaccatgcacgatgtcatgttcaatggaggcatccagacctttcaggcgagacagtttcgccaccagcatcaacagcacagttaactgggtggtgaatgctttggtggaggccacgccaatttccgtaccggcgttggtcatcagcgccagatcggattcgcgcaccagagaagaacccggaacgttacagattgccagcgaaccaaggtaacccagctctttcgacagacgcaggcccgccagggtatccgcggtttcgccagactgtgacaaggtgatcatcaggctgttacgacgcacggcagatttgcgatagcggaattcagaggcgatttcgacgtcgcacggaatacctgccagcgattcaaaccagtagcgggaaaccataccggagttataagaagtaccacaggcgaggatctgaatatgctcaaccttcgacagcagttcatcggcgttcggtcccagctcgcttaaatcaacctgaccgtggctgatgcgcccggtaagggtgtttttgatcgcgttcggctgttcgtagatctctttctgcatgtagtggcggtaaatacctttatcgcccgcgtcatattgcagattggattcgatatcctgacgttttacttccgcgccagttttatcgaagatgtttaccgaacggcgagtgatttccgcaatatcgccctcttcaaggaagataaaacgacgagtcactggcaacagcgccagctggtcagaagcgataaagttttcgcccatacccaggccaatcaccagcggactaccagaacgtgccgccagcagggtatccggatgacgggagtccatgatcactgtaccgtacgcaccacgcagttgcgggatagcacgcagaactgcctcacgcagagtaccgccttgtttcagctcccagttcaccaaatgtgcaatcacttcggtgtcggtttcagaaacgaaggtatagccacgtgcttttaacgcttcacgcagcggttcatggttttcgatgatgccgttatgcaccaccacaatgtgttcagaaacatgcggatgcgcgttagcttctgaaggttcaccatgggtcgcccagcgagtgtgagcaataccggtgccgccatgcagaggatgttcttccgctgcctgagccagcatctgtactttaccgaggcgacgcaggcgggtcatatgaccttctgcatcaacaacggccagaccggcagaatcatatccgcggtattccagacgacgtaaaccttcaagaaggatttctgctacatcacgttgcgcgatcgcgccaacaattccacacatagtttttgattccgatttatatcgttgtcggtcaacctgtatgcccgtttttcgggcgccccgagccttgtagagagtggggttatttttatagttactgcttgtgggcgggagattatgttatctcctcatcccatatgaccggattacccggccagaattactttttctttatcggacgacgccagccttctttttgagtctgcggcacacggctgatagccagggcattttcgccgacattacgcgtcacggttgtacccgcagcaatggtcgcgcctttgcctactgttaccggggccaccagttgagtgtcggaaccgacaaacacatcgtcgccgataatagtcttaaatttattcgcaccatcgtagttgcaggtaatggttcccgcgccgatgttaacgttatcgccaatttccgcatcgcccaggtaagtcagatgaccagctttcgagcctttacccagacgcgcttttttcatctcaacgaagttaccgacgtgtgcaccttccagcaactcagcaccaggacgcagacgggcaaacgggccaatagtacaggccgctgccagattcgcatcttccacgacggtatacgggctaatttcgcaatcatcgccaatcacgctgtttttaatcacgcaaccggcgccgattttcacgcgatgaccgagagtcacgttgccctcgatgataacgttagtatcaatttcaacatcgcgcccgtgagtaagcgtaccgcgcagatcaaaacgcgccggatcgcgcagcataacgcctgctaacagcagtttttcagcctgttcggactggtaaacgcgctccagtcgggagagttgcaggcggttattcacgccttctacttcgcttaaacgttgcggatgaacggcgacgatttcacgtccttcctgatacgccagcgcaataatgtcggtgatgtagtattcgccctgagcattattgttggtcagcttcgccagccagcgtttcatatctgcgccgttggcaatcagaatgccggtgttgatctcctgaatctgacgctgctcgtcggtggcatctttgtgctcaacaatgccggtaactttgccgttttcacgggtgatacgtccataaccggtcggatcatccagttttaccgtcagcagaccaatgccaccctgcggtttagcatcacgcagacgctggagtgtttcgacagagatcagcggcacgtcgccgtagagcattaaaatgtcttcatcatcggcaaagaaaggtgcggcctgctgcatcgcatgacccgtacccagctgttctgcctgaagcacccagttcaggttgtcgtctttcagcgcctgcttaagcagatcgccgccgtgaccatacacaaggtgaacgtgcgctgcgcctaattcattcgcagcatcaatgacatgctgaaccatcgctttcccggcaagggtatgcagcactttcggaagatcggaatacatgcgcgtgcctttgcctgcggcaaggatcactacgctcatagcattattcaacatacgcgtcctgactgtaatttgagaacgaatttaaaccgcttcaccttgaaaaaactacatttttttcatcgtgaaatggacagaggataaattgttcaataacggattatccccgctgacgaaagcgccattttcgaccatcgtcacgccttttgtctgcagaaaattaaggcagtaccttcatttaagcgtcaggtggatgtttttgctcttatttcgatcaatgaataaacgggaaaacaggggtgttttatatcatcaggatctatgtgaacgcttttcaggacgggtcaatacgcgtaaaaaaaagccagcctgttgccagactggcttttgtgcttttcaagccggtgttacatcgcttttttggtcaactcgataacgcgcagctgcgcgatcgctttggccagttccgcagacgcctgagcgtaatctacgtcgccgtgagagctgctaatgtgctcttcagccttacgtttcgcttccatggctcgcgcttcgtcgagatcctggccgcgaattgcggtgtcggccagaacggtcacgttgccaggctgcacttcaagaatgccgccagacagatagataaactcttcgtgaccgtgctgtttcacgatgcgaatcataccaggcttaatggcggtgagcagcggtgcgtggccagggtagatccccagttcaccttcgctacccgttacctggattttctcgaccagaccagagaacatttgttgctctgcgctgacgacgtccaggtggtaagtcattgccatatcaccctccgattaaggcgttaaagttttttggctttttccacagcttcttcgatggaaccgaccatgtagaacgcctgctccggcaggtgatcgtattcgccttccatgatgcctttaaagccacggatggtgtctttcagggagacgtatttacccggagaaccggtgaatacttctgccacgaagaacggctgggacaggaagcgctggatcttacgagcacgcgctaccaccagtttgtcttcttcagacagttcatccatacccaggatggcgataatgtctttcagttcctgataacgttgcaggatggactgaacgccacgcgcagtgtcgtagtgttcctgaccaaccaccagcgggtccagctgacggctggtggagtccagcgggtcaacggccgggtagatacccagagacgcgatctgacggctcagtaccacggttgcgtcaaggtgcgcaaaggtggttgccggagacgggtcagtcaagtcatccgcaggtacgtatactgcctgtacggaggtgatagaaccggttttggtggaggtgatacgttcctgcagaacgcccatctcttccgccagggtcggctgataacctaccgctgaaggcatacggcccagcagtgcggatacttcggtaccggccagggtgtaacgatagatgttatcgacgaacagcaatacgtcacgaccttcgtcacggaatttctcagccatggtcagaccggtcagagcaacgcgcagacggtttcccggcggctcgttcatctggccatacaccagggatactttgtcgataacgttggagtcggtcatttcgtggtagaagtcgttaccctcacgagtacgttcacctacgcccgcaaacacagagtaaccggagtgctcgatcgcgatgttacgaataagctccatcatgtttacggttttacctacacccgcaccaccgaacagaccaactttaccgcccttagcgaacggacacatcaggtcgataactttgataccggtttccagcagttcctgagagtttgacagctcttcgtaggaaggtgctgcgcggtgaatcgcccaacgctcttcttcaccgatctcgcctttcatgtcgaccggttcacccagtacgttcatgatacggcccagagtcgctttacctaccgggacttcgatcgggtgttcgaggtcttttacatccagaccgcgacgcagaccgtcggaggaacccattgcgatggtacgcacgataccgccgccgagctgctgctgaacttccagcaccagacgctcattaccattttgcacctcaagagcatcgtacacgcgcggtacggcatcctgagggaattcgacgtcaactacggcgccgattacctggacaatctttccagtagccatcttaaatcctctacgaaataacctgtttaaaccgcggcggcccccgagacgatctcggtgagttcctgagtaatgctggcctgacgagctttgttgtataccaactgcagctctttaatcaggctgccgccattgtcggtcgcggctttcatcgccaccatacgggcggcctgctcgctggccaggttttcaaccacgccctgataaacctgagattcgacataacgacgcagcagggtatccagcaacgccttcggatcgggttcgtacaggtaatcccaggatttgtgtttcagatcatcatcatctgatgccggtaacggcagcagctggctgatggtcggaacctgagacatggtgttaataaatttgttgctgacaatgtaaagcttgtccagacggccttcgtcgtaggcctgcaacatcacttttaccggaccgatcagttcggacagggaagggttatcccccatgccggtgacctgggcaacaacattgccgcccacggagttgaagaacgacacgcctttcgagccgatcattgcgaggtcgcattgaacgcctttgtcggtccaggtcttcatttccgccagcagttttttgaacaggttaatgttcaaaccaccgcacaaaccacggtcggtcgacaccaccaggtagcccacgcgtttaacgtcgcggtcttccaggtaagggtgcttatattccagattaccgtgtgcaaggtgaccaatcactttgcgcatggtttctgcataaggacggctggccgccatgcgatcctgcgatttacgcattttggaagcggcgaccatctccatcgctttagtgatcttttgcgtgttctggacgcttgcgatcttactacgtatctcttttgcgccggccatgagcttctcctcaatgccttgcggcctgccctaaggcaagccgccagacgttaccaggattgggttgctttgaaggaatcgaggatgcctttcagcttgccttcgatttcgtcgttgtagccaccggtctggttgatctcttgcatcaacggagcgtgatcacggtcgacgtaagccagcagagcggcttcgaagctaccgattttcgacagttcaacatccgccaggtaaccacgttctgctgcgaacagaaccagagactgttgcgctacggacatcggcgcatactgtttctgtttcagcagttcggtcactttctgaccgtggtcaagctgcttacgtgttgcatcgtcaaggtcggatgcaaactgagagaacgctgccagttcacgatactgtgccagagcggtacggataccaccggacagttttttcatgatcttggtctgtgctgcaccaccaacacgggatacggaaatacccgggttaaccgcaggacgaataccggcgttgaacaggttggtttccaggaagatctgaccatcggtaatggagattacgttggtcggaacgaacgcagaaacgtcacccgcctgagtttcgataatcggcagcgcagtcagagaaccggttttccctttcacttcacctttggtgaaagcttcaacgtattcggcgttaacacgcgcagcacgctccagcagacgagagtggaggtagaatacgtcgcccgggaatgcttcacgtcctggcggacgacggagcagcagggagatctgacggtaagcaacagcctgtttagacaggtcatcgtaaatgatcagcgcatcttcaccgcggtcacggaagtattcacccattgcgcaaccagcgtacggtgccaggtattgcagtgctgcggattcagacgcggttgctaccacaacgatggtgttagccagtgcgccgtgctcttccagtttacgtaccacgttagaaatggtggacgctttctgaccgatagcgacatagatacatttgataccggaatcgcgctggttgatgatggcatcgatagccagtgcggttttaccggtctgacggtcaccgatgatcaattcacgctgaccacgaccgattgggatcatggagtcaacggctttataaccggtctgtaccggctgatctacggactgacgttcgataacgcccggagcgattgcttctacagcagagaagccgtcgtgatccagcggacctttaccgtcgattggtgcacccagagtgttaaccacacggcccagcaggccacggccaaccggaacttccaggatacggccagtacacttaactttcatgccttcggcaaggtcagcgtacggacccataacaaccgcacctacagagtcgcgctcgaggttcagtgcgatagcgtaacggttacccggcagggagatcatttcaccctgcatacaatcggccaggccgtgaatgcggataacaccgtcacttacagaaacaatagtaccttcgttgtgagcttcactcacaacattgaactgagcaatgcgctgcttgatcagttcgctgatttcggtggaattcagttgcatgctccagtccccttaagactgcaagacgtctgcaaggcgctcaagacgaccgcgtacgctgccatcaatgaccatatcacccgctcggatgataacgcctgccattacagacttatcgattttgcaattcagcttaactttgcgtgacagacgtttttccatcgcagcagaaattttcgcgagctgttgttcactcagtgcggcagcggaaatgacgtctacctcagcggtagcctcactcacggcacgcaggtgaataaactgctccagaacatccgggagcgccttaagacgaccattttcagccattacccgaatcaggttctgaccgttttcgtccagttgctcaccacaaactgcgataaacgactcggcgagcgtttctggcgcaagcgcgccagagagaagctctgccatttgttcgtttttggttacctcggcggcaaacgccagcatgtcctgccagcgttctacactttggtgttcgacggcaaagtcaaaagctgctttggcgtaggggcgagctaccgtaataaattcagacatcagcccctccctccttacagttcagcgacaagtttatccacgatgtcgctgttagcagcttcatccacggaacgttcgatgatcttctcggcgccagcaacagccaggatagcaacttgcttacgcagctcttcacgggcacgtttacgctcggcttcaatttccgcctgcgcctgggccacgattttagtacgttcctgttctgcctcagctttcgcttcatccagaatctgcgagcggcgtttgttagcctgctcgatgattacctgggcttccgctttcgcttttttcagctggtcggtcgcgctggcctttgcaaggtcaaggtccttatgtgctcgttctgcggaagcaaggccgtcagcaatttctttttgacgtttttcgatggctgccattaatggcggccatacgtacttcatgcagaacagaacgaacaggacaaacgcgatggcctggccgaggattgttgcgttaagattcacagcacaatgcctctatttagttaacgttctgatattgctctttaaataaaagcaacgcttactacgcgacagcgaacatcacgtacagacccagacctacagcgatcatcgggatagcatccaccagacccataacgataaagaactgagtacgcagcagaggaatcagatcaggttgacgcgctgcgccttccaggaatttacccccgaggatgccgataccgatcgcagcaccgattgccgccagacccatcatcacagcggcagccatgtacagcagatccatattcaggttttccatgacagtctccagtttgtttcagttaaaacgtagtagtgttggtaaattaatgttcttcagacgccatcgacagatagacgatcgtcagaaccatgaagatgaaggcttgcagcgtaatgatcaggatgtggaaaatggcccacggcacattcaggatccactgtgaccaccacggcaacagaccagcaatcagaatgaaaatcagctcaccggcatacatgttaccgaacagtcgcaaaccgagtgaaactggtttggacagcaggcttaccccttcaaggattaagttgacaggaatgaacgcccagtgattgaacggctgcagcgtcaactctttcgtgaagccgccgatgcctttcattttgatgctgtagaacagaatcaggataaatacgcccagtgccatagacagcgttacgttcacgtcagcagacggaaccacacgcagtgcaggcagacccagtacatgttcagcaatgtacggcagcaggtcgataggcagtaaatccatcaggttcatcaggaatacccagacgaagatcgtcagggccagcggagcaatcagcttgcttttgccatggtacatgtctttcacgctaccattaacaaagccgatcaccagctcaatcgcggtctgaaacttacctggcacgccgctggttgcctttttggctacactacggaataaaaccaggaacaacagacccagcaccaccgagaagaacatggagtcaatattgattgtccagaaggtggctggggggttatgtggatccaccagcgagaatgtacgcaggtccagctgaaggttattcaggtggtgtcctatgtaatcctgcggcgtcatattttctgaagccatgatgccttttaccctttgttgttaattacagccggtgccagtatctgaaccaccagcaccaaaacccacgtaacgatcagcggcaagaataccgcctttaaaaccgccaacgccaccaccagtaacaccaacatcgccagaactttgaaagcttcgccaaatgcgaatgtccaggccacccggcctttcgctggtgtatgcgcctggtgacgccaggcaaatatcataaacaaaacgttaggcagaaagactgccaggcccccgcttattgcagagacgccccagaaggggtctttgaggctgaacagcaatccacttgctatcaccaccagtaactgaacgagcagaagcttccgagcaacgtttcgactcacgagcgacacagacatcacgtttttcactcctgctcccttcgaggtatgccgcgtgtcgtataaaactttctttaaggcttagagtcaagcatcaaaaagcggtcaaattatacggtgcgcccccgtgatttcaaacaataagtagccaaaaggtgaataaatgtttaaatatttttccagtgcatacaattgcgacttttctgcaaaccctgttcgatcatgaaaaactgtaaataacgcgtaaacactggtgataaagcgtgcttcagatcacatattgcgcatgttcgcgcacagcatatttatttacttggcaaatgatgcctttgcaagtttatgatatttcagtctaaaaacagatactgttttaataaatgacatttacataacaaaaaccacccattgacatttttaataatattttaacagtcaatgatgattcttagcgccgatttttagcagactgatattttcacttatgacttattttctgcttaccaaaaaaagccacgttatcttgttgatacaaaagagtgaacgtggcgttaaatgtaaccagttatatcagtagaaaacctggttgttgttaacagtctaaccggtcaattttttatgatttttttgataaaaattaaattttatttgctttaatcaccaccagatgacgttcgccatccagggctggaacctgaagtttaaccactgattcgacctgatattcttcgggcaacaaagcgatttcatcttccggcatttgccctttcagcgcgtagaaacggccttgctcaccaggaagatggtggcaccagctcaccatatcgttcagagaggcaaaagcgcggctaattacgccatcaaatggcggctctgacggaaactcttctaccctactctgtactggctcaatattctccagtttaagctcatgttgcacctgacgaaggaaacgcacgcgtttaccaaggctatccaacaacgtgaaatgagcttcaggacgcacgatagagagtggaatgccaggcagtcccggtccggtgccgacatcgataaaccgttcaccttgcagatacggtgccaccacaatgctatcgagaatatggcgtaccagcatctcattaggatcgcggaccgaagtcaggttgtacgctttattccatttatgcagcatattcacgtaggcaataagctggtttttctggtgatcggtaagcgaaatacctgcgtctttcagcagtaaggagagtttgttgagcacggtgattacctgttcttgatgcgttgcctggtaagcgggtgcataccaggcatttttaatgcgttatgcgctacgacgcagcataccctgttttttcagccacaccagcagaatggagatagccgcaggcgtgacgccagaaatacgcgaagcctggccaatagaggccggtttgtgatcgttaagtttggcgatcacttcgttagaaagaccggatacctggcggtaatccagcgtcgctggtagcagggtattctcgttacgcagctgcttttcgatctcatcttgctggcgcgcgatataaccttcgtatttaacctgaatctcaacctgttccgcagcctgttcatctgtcaacgcaggggcaaacggtgtcagcgtggttaatttttcataagtcatttcaggacgacgtagcagatcttcaccactggcttcacgggaaagcggcgcagtcaggtgagcattcacttcggctgcagcttccgccgacggggttacccaggtcgatttcagacgctgacgctcacgctcgatattctcaagtttctcgttaaagcgcgcccaacgttcgtcatccaccaggcccagttcgcgaccgatttcagtcaaacgcagatcagcattatcttcgcgcagcatcagacgatattctgcgcgcgaggtaaacatacgatacggttctttggttcctaaagtgcacaggtcatcaaccagtacgccgagatatgcctgagaacgcgccggagcccaaccttctttgtcagcagacagacgggcagcgttaagaccagccagcaaaccttgcgcagcggcttcttcgtaaccggtagtgccgttaatctgaccagcaaagaacagcccctggataaacttgctctccagcgtcggtttcaggtcgcgtggatcgaagaagtcatactcaatggcataacccggacgcacgatcttcgcgttttccatcccctgcatggagcggacgatttgcatctgcacatcgaacggcaggctggtggagataccgttcggataaatttcgttagaggtcagcccttccggttcaaggaagatctgatgctgatttctgtcggcgaagcgcatgactttgtcttcgatcgacgggcagtagcgtgggccgacaccttcgatcacccctgcgtacattgggctacgatcgaggttactgcggatcacatcatgggttttctcgttggtatgagtgatataacacggcacctgctggggatgctgggacgcattgcccataaacgagaatactggcattgggttatcgccatgctgttgcgccagtacgctaaagtcgatggttcgagcatcaatacgcggtggtgtcccggttttcagacgaccaacgcgcagcggcagttcacgcaaacggcgagaaagcggaatggacggcggatcaccagcacggccaccgctgtaattatccagaccgatatgaattttaccgtcgaggaacgtcccaacggtgagcacgacagctttggcacggaacttcagtcccatttgggtaacggcaccgaccacgcgatcgttttcgacaataagatcttcaactgcctgctggaagatcatcaggttcggttggttctccagcgccgtacgtaccgcctgacggtagagcacacgatctgcctgagctcgggtagcgcgaaccgccggtcccttgcttgcgtttagtatcctaaactggatacccgcctgatcgatcgctttcgccatcagaccgccgagtgcatccacttcttttaccagatgtcccttcccaataccgccgatcgccgggttgcagctcatctgccccagagtgtcgatattgtgtgtcaaaagcagagtctgttgacccatacgcgccgcggccatcgcggcctcggtgcctgcatgacccccgccaatgatgatgacgtcaaaaggatccggataaaacatggtgattgcctcgcataacgcggtatgaaaatggattgaagcccgggccgtggattctactcaactttgtcggcttgagaaagacctgggatcctaggtattaaaaagaagatctatttatttagagatctgttctattgtgatctcttattaggatcgcactgccctgtggataacaaggatccggcttttaagatcaacaacctggaaaggatcattaactgtgaatgatcggtgatcctggaccgtataagctgggatcagaatgaggggttatacacaactcaaaaactgaacaatcgttgttctttggataactaccgtttgatccaagcttcctgacagagttatccacagtagatcgcacgatctgtatacttatttgagtaaattaatccacgatcccagccattcttctgccggatcctccggaatgtcgtgatcaagaatgttgatcttcagtgtttcgcctgtctgttttgctccggaatttttgagttctgcctcgattttatcgatagccccacaaaaggtgtcatattcacgactaccaataccgattgcgccaaagcggaccgcagaaagatcgggcttctgttcctgcaatgcttcatagaaaggagaaaggttgtccggaatatctccggcaccgtgggttgagctgataaccagccagatccccgaggcagataaatcttccaacagcggaccgtgcagcgtttcggtggttaaacccgtctcttccagcttttcagccaggtgttctgctacatattcggcaccgccgagggtgctgccgctgataagagtgatatctgccataaaccgccacctttattaagagtagcgtattgtacgctgtgaacgcgttgggatctacctgtggaaaagtatgggattaaaaaagccgatcagggcttaatggtacgcatgatcggattctgcaggacgatcagtgtctcggtggactgaatttcatcaattgtttggatcttgttgataagtacatgctggagagcatcgatcgaacggcacatcacttttataaagatactgtagtggccggttgtgtaataggcttcagtgacttcatcgaggctttccagctttgccagcgcggaaggatagtctttggcgctctttaatataatgccgataaagcagcctacgtcataaccaagctgcttcgggctgacatcaatacgcgccccggtaatgatccccgcctgcttcattttctctactcgaacgtgaatcgtccccggactgacgccaaattgtttcgccagttcggcgtaagcggtgcgcgcattgcccattaatgcttccaggatgcctcggtccagattgtcgatcagataattttccataggattttcttatgcggattgatgattcattctattttagccttcttttttaatgaatcaaaagtacgtgaggctttttattgaatgattattgcatgtgtgtcggtttttgttgcttaatcataagcaacaggacgcaggagtataaaaaatgaaaaccgcttacattgccaaacaacgtcaaattagcttcgtgaaatctcacttttctcgtcaactggaagaacgtctggggctgatcgaagtccaggcgccgattcttagccgtgtgggggatggcacgcaggataacttgtcgggctgtgaaaaagcggtgcaggtaaaagtgaaagctctgcctgatgcccagttcgaagtggttcattcactggcgaagtggaaacgtcagaccttagggcaacacgacttcagcgcgggcgaagggctgtacacgcacatgaaagcccttcgccccgatgaagaccgtctttccccgttgcactcggtctatgtagaccagtgggactgggaacgcgtaatgggcgacggcgagcgtcaattctcgactctgaaaagcacggtagaggcgatctgggcgggaattaaagcaaccgaagctgcggttagcgaagagtttggcctggcaccgtttctgccggatcaaatccacttcgtacacagccaggagttactgtctcgttatccggatctcgatgccaaagggcgtgagcgggcgattgcgaaagatcttggcgcggtattcctcgtcgggattggcggcaagttgagtgatggtcatcgtcacgacgtgcgcgcaccggattatgatgactggagcaccccgtcagagctgggccatgcgggtctgaacggcgatattctggtatggaacccggtactggaagatgcgtttgagctttcttccatggggatccgcgtggatgccgacacgctgaagcatcagctggcgctgaccggtgacgaagatcgcctgcagctggagtggcatcaggcgctgctgcgcggtgaaatgccgcagaccatcggcggcggtatcgggcagtctcgtttgaccatgctgctgctgcaactgccacatatcggccaggttcagtgtggtgtatggccggcagctgttcgcgagagcgtcccttctctgctgtaataatttatcgccgccagcgtctgagcaggcggcttcgcatcccggtatcaaagcgccagatatgatcgaaaatgcgcatgatgccgggtttgccatgtgccgacatcgccacggcatgaaagcgatgctgatgtacccgctgcaactctttcactttgctcgtcacgtcgtcaggcaatcgctgggcgataaaatcagaaatcaccaccgcatcggcatcaaaccattcccggctttgcaagcgttccataatggcgcgaaaacaactggcaagatcggtgccgccacgaaactgctggcttaaaaaacggattgcttgttcgatgccttgtgggcctgaaagctcataacggacgatctcggtggaaaatagcataatatagcagcgccggttttcagcgagggctatgcgcatcaaggccaggcagaacgctttcgcacactgttcattaaagccgcccattgagccggaagtatccacgcagacaataaacggtccgcgcggctgttcgtcgtaatctttatgcaccaccgggcgttcgatcattttttcacgccacgactcaccatgcaggcgataggtgagcaactgtttttccaccagccgacggtaaaactcatactccagttcagttatccctagtgtcgccagttctggcggcaagagacgtaaaatatcatcgctttgctgcagaccatcaacctgctcaggaactgtcgccggttcgcgcaccatggtgcggaaggtttccatctgcgcatcgttgcgcggtattgatttggcttcccgggaacgccccagctgttctgccagacgtttcagttccggctgttcgttaagaaattcaccgtatttcacaatcaactgatagtcgccacgtttaagctgaccggcgctcatatcccacagacgaccagctgcggtattgttatctgcgagaatcggttcaagttgcccgctcagcgtcatgcgttcctgaacttcactcaacagttgttcgcgttcttcttctaatagctgctgatttaacgtcgttgcttgcacgatcaggcttaaacgccagcgctggagaaaaagcgtgtgtaacgctgaagtgatcgtgctgttagcatcaaccaactgtcgggcttgttctgcccatggggaattcagacgatgcagtaagtccaggatctgtggtagctgcacaataaattgcggcgtggagaggagctgactttgctgatagcacatcacctcttcggtgagttccggcgggactcgggcatctttaagccgactgcgcagcgcctcacgccagcggggaacatcatcagtgattgccgccttcagtcgtgggaatttttcaaagaagactgccagctgcggtgaggccagcagcgcgatgatcatctcttcgatcaatccctcttcgctgacggccagcatcacattaagcgtatccagcgttagcattgttgtgcctggcgaatctgtgcgccgacatcctgtaggctggcttcaatgcgacctaaccagtcgccagggataaacagacatttttgctgttcgctgaataaagcgtgttgcttgcgccagtcgctttcaagctcttccagttgttgttttatttcacctggcagaccttcagccaatgaaccgggaagtgctagcgtactgccttgtaaacttacatcgcgtacaacaagatgttgggcgctatcgacttccagattcagtttctgggcaaagccgataccgttcagtttgccgcgaatctcaccacctttactcagccactgttccagcgcgctacgctcaaaggagatatgaaccacttccatatcatgcaattttaacggtttttgcagcagcagagtcagagtggaagcagtaacgttaacagggagttgatactgctgacgacggctaaaaatgccgcccagacgaattaccgttaaggctgttttatcgctttgttgctgctgaagttgcaggtgacgttgcacaatcgcgcccaggcgggtcaacatcccttgctgttgccaggcgtgaccggtcatcaatacatcaatttgttgttgtatcaaattcaggctttgcgcgtcataccacaggcaatctttcagcaaaatgagatcaaccggggcgacagcactgcgaccgctaaaaaaggcgctggcctgcaataagcggatcgcttttttccagcgacgatccgagacataaggcgcatccggtaatttatccagttgctggcgcagcataaaaatcagctcaaatacatgatcgggcagcgtaatttcaccaatctctttctgccagcgttcatattcttcatctgtgatctgcaaggaggcaggaaccggattgtcattttcatcctgttgactggtcagcatggagcggaaattcgctttatcctgcactttatctaaccacagacgaatcagcatgcgatcatataacgcttccagactgctgtctgcttccggcagctcgttggaggccgccaccagcagacgcatcgggattttttctacgagtgcgccgttgcggaactggcgctcgttaatggcggtgagcagggtattaagaattgccggacccgctttccagatctcatccagaaagacgatttcagcttccggcaggtaaccgctggttaaacgttcatagcgcccttcatcttttagcgcctgaatagaaaggggaccaaaaacttcttccggcgtggagaagcgggtcatcagatattcaaacgcgcgggcattctgaaaggcgaattttaagcgccgggcgatcaaacttttggcaatacctggcgggccaaggaggaacacactttcaccacttaatgccgctaataaacacaagcggatggcgtggctacgttcataaagccccttttccaacgaactgctcaggcgggaaattctttccgctaataaatgagggtgagccataatgaagtggcgtcctttcgtcaaaagttctgcgtaaattgcgagtatagacgtttcttgctggtggctaaaatagtctcaaaggaggggtatttttctttgagccaggttaatgtggccgcatttaggagtacgattttgccgttaatcgtgcatactgtgcgcttttttgtgggccaagggactaagcacacatttcatatttcaacgaaagactagtctatgagcactgataataagcaatcattgcccgcgattaccctcgcggcgattggagttgtctacggcgatattggtaccagcccgttatatacacttcgtgaatgtttgtccggccagtttggttttggcgttgaacgcgatgccgtgtttggctttttatcgctgatcttctggctgctaatctttgtggtttccattaaatatctcaccttcgtgatgcgggcagataacgccggtgaaggggggatcctgacgttgatgtcgcttgccgggcgtaatacgtcggcgcgaaccacatcaatgctggtgattatggggctaatcggcggcagctttttctatggtgaagtcgtcataacacccgctatttcggtgatgtccgccattgaaggtctggaaatcgtcgccccgcagctggatacctggatagttcccctctcaattatcgttctcacattattattcatgattcaaaaacatggcacggctatggtcggtaagctgtttgcgccgatcatgctgacctggtttttgattctggcagggctggggttacgtagcattattgctaacccggaagtgctgcatgcactgaatccgatgtgggcggtgcatttcttccttgaatacaaaacggtttcttttattgcattaggggcagtggtgctgtcgattacgggggtcgaggcgctgtatgctgatatggggcactttggtaagttccctattcgtctggcgtggttcaccgtcgtattgccttccttaacccttaattacttcggccagggagcgctgttgttaaagaatccggaagcgattaagaacccgttcttcctgttggcaccggactgggcgctgatcccgctgctgatcatcgccgcactggcgacggtaattgcctcgcaggcggttatctctggcgtcttctcattgacgcgtcaggcggtacgtctgggatatttgtcgccgatgcgcattattcacacttccgaaatggagtcagggcaaatctatattccctttgtgaactggatgctctatgtcgcggtcgtgattgtgattgtcagctttgagcactccagcaacctggcggcggcgtacgggattgcggtgaccggaaccatggtgctgacgtctattctctcgactaccgtggcacgtcagaactggcactggaataagtattttgttgcgctgatcctgattgctttcctttgtgtcgatattcccttgttcaccgctaacctcgataaactgctctccggcggctggttgccattgagcctcggtacggtgatgtttatcgtgatgaccacctggaagagcgagcgtttccgcttgctgcggcggatgcatgaacatggtaactctctggaagcgatgattgcttcgctggagaaatcaccgcccgttcgcgtgcccgggaccgcggtgtatatgtcgcgtgcaatcaacgtcattccctttgcgctgatgcataacctgaaacataacaaggtattgcatgagcgggtgattctgttaactctgcgcaccgaagacgcgccatatgtccataacgtccgtcgggtacagattgaacaactgtcgcccactttctggcgcgtggtggcaagttatggttggcgagaaacgccaaacgtggaagaagttttccaccgctgcggtctggaaggattaagttgccggatgatggaaacctccttctttatgtcgcatgagtcgttgatcctcggcaaacgcccgtggtatttgcgtctgcgcggcaagctgtacttgctgctgcaacgtaatgcgctgcgggcaccggatcaatttgaaatcccgccaaacagagttatcgaactgggtactcaggtcgaaatctaacgccagacgcctcctttctccataagggggcgtttttgttttcatggttaatcaccatgtaaaacgtttcgaggttgatcacatttccgtaacgtcacgatggttttcccaactcagtcaggattaaactgcgggtcagcgaaacgtttcgctgatggagaaaaaaatgaaaaaaggcaccgttcttaattctgatatttcatcggtgatctcccgactgggacataccgatacgctggtggtgtgtgatgctggtttacccatccccaaaagtacaacgcgtatcgatatggcattaacccagggtgtaccttcttttatgcaggtgctgggtgtagtcacaaatgaaatgcaggtcgaggctgtcattatcgcggaagagatcaaacaacataatccgcaactccacgaaacgttgctcactcaccttgagcagctgcaaaaacaccagggaaacaccattgaaattcgttacaccacgcatgaacaattcaaacaacaaaccgcagaaagtcaggcggtaattcgcagcggagaatgttctccgtatgcgaatatcattctctgtgctggcgtgacgttctgaggccgtcatggaagcattacttcagcttaaaggcatcgataaagccttcccgggcgtaaaagccctctcgggcgcagcgttaaatgtctatccgggccgcgtgatggcgctggtgggcgaaaacggcgcgggtaaatccaccatgatgaaagtgcttactggtatctatactcgcgatgccggtacgcttttatggttggggaaagaaacgacatttaccgggccgaaatcttcccaggaagccgggattgggattatccaccaggaactgaacctgatcccgcagttaaccattgccgaaaacattttcctcggtcgtgagtttgttaatcgctttggcaaaattgactggaaaaccatgtatgccgaagcggataaattgctggctaaacttaacctgcgctttaaaagcgacaagctggtgggcgatctttccatcggtgaccagcaaatggttgaaatcgccaaagtgctgagctttgagtcgaaagtcatcattatggatgaaccgaccgatgcgctgaccgataccgaaaccgaatccttgttccgcgtcatccgcgagctgaaattgcaaggccgcggtattgtctatatctcccaccgcatgaaagaaatcttcgagatttgcgatgacgttaccgtttttcgtgacggacaatttattgctgagcgcgaagtggcatcactgaccgaagattctctgattgagatgatggtgggccgcaagctggaagatcaatatccgcacctggacaaagcgccgggagatatccgcctgaaagtcgataatctctgcggacctggcgttaacgatgtctcttttactttacgcaaaggcgaaattcttggcgtctctggtttgatgggcgctgggcgtaccgaactgatgaaagtgctctacggtgcactgccgcgcacaagcggttacgtcaccctggatgggcatgaagtcgttacccgttcgccgcaggatggcctggcaaacggcattgtttatatctccgaagaccgtaaacgtgacggtttagtgctgggcatgtcagtaaaagagaacatgtcgctgaccgcgctgcgctacttcagccgcgctggcggcagtttgaagcatgccgatgaacagcaggctgtgagtgatttcattcgtctgtttaatgtgaaaacgccatcgatggaacaggcaattggtctgctttccggtggcaatcagcaaaaagtagcgattgcccgtggtctgatgacacgccctaaagtgttgatcctcgatgagcctacccgtggcgtagatgtcggcgcgaaaaaagagatctatcaactgattaaccagttcaaagccgatggcttgagcatcattctggtgtcatcggagatgccagaagtattaggcatgagcgatcgcatcatcgtcatgcatgaagggcatctcagcggggaatttactcgtgagcaggccacccaggaagtgttaatggctgccgctgtgggcaagcttaatcgcgtgaatcaggagtaaaaaaatgacaacccagactgtctctggtcgccgttatttcacgaaagcgtggctgatggagcagaaatcgcttatcgctctgctggtgctgatcgcgattgtctcgacgttaagcccgaactttttcaccatcaataacttattcaatattcttcagcaaacctcggtgaacgccattatggcggtcgggatgacgctggtgatcctgacgtcgggtatcgacttgtcggtaggttctctgttggcgctgaccggcgcagttgctgcatctatcgtcggcattgaagtcaatgcgctggtggctgtcgctgccgctctcgcgttaggtgccgcaattggtgcggtaactggggtgattgtagcgaaaggtcgcgtccaggcgtttatcgctacgctggttatgatgcttttactgcgcggcgtgaccatggtttataccaatggtagcccagtgaataccggctttactgagaacgccgatctgtttggctggtttggtattggtcgtccgctgggcgtaccgacgccagtctggatcatggggattgttttcctcgcggcctggtacatgctgcatcacacgcgtctggggcgttacatctacgcgctgggcggcaatgaagcggcaacgcgtctttctggtatcaacgtcaataaaatcaaaatcatcgtctattctctttgtggtctgctggcatcgctggccgggatcattgaagtggcgcgtctctcctccgcacaacccacggcggggactggctatgagctggatgctattgctgcggtggttctgggcggtacgagtctggcgggcggaaaaggtcgcattgttgggacgttgatcggcgcattaattcttggcttccttaataatggattgaatttgttaggtgtttcctcctattaccagatgatcgtcaaagcggtggtgattttgctggcggtgctggtagacaacaaaaagcagtaataacgactacaggacatcttgaatatgaacatgaaaaaactggctaccctggtttccgctgttgcgctaagcgccaccgtcagtgcgaatgcgatggcaaaagacaccatcgcgctggtggtctccacgcttaacaacccattctttgtatcgctgaaagatggcgcgcagaaagaggcggataaacttggctataacctggtggtgctggactcccagaacaacccggcgaaagagctggcgaacgtgcaggacttaaccgttcgcggcaccaaaattctgctgattaacccgaccgactccgacgcagtaggtaatgctgtgaagatggctaaccaggcgaacatcccggttatcactcttgaccgccaggcaacgaaaggtgaagtggtgagccacattgcatctgataacgtactgggcggcaaaatcgccggtgattacatcgcgaagaaagtgggtgaaggtgccaaagttatcgagctgcaaggcattgccggtacatccgcagcccgtgaacgtggcgaaggtttccagcaggccgttgctgctcacaagtttaatgttcttgccagccagcctgcagattttgatcgcaccaaaggtttgaacgtaatgcagaacctgttgaccgctcatccggatgttcaggctgtattcgcgcagaatgatgaaatggcgcttggcgcgctgcgcgcactgcaaactgccggtaaatcggatgtgatggtcgtcggatttgacggtacaccggatggcgaaaaagcggtgaatgatggcaaactagcagcgactatcgctcagctacccgatcagattggcgcgaaaggcgtcgaaaccgcagataaagtgctgaaaggcgagaaagttcaggctaagtatccggttgatctgaaactggttgttaagcagtagttttaatcaggttgtatgacctgatggtgacataaatacgtcatcgacagatgaacgtgtaatataaagaaaagcagggcacgcgccaccctaacacggtggcgcattttatggacatcccgaatatgcaaaacgcaggcagcctcgttgttcttggcagcattaatgctgaccacattcttaatcttcaatcttttcctactccaggcgaaaccgtaaccggtaaccactatcaggttgcatttggcggcaaaggcgcgaatcaggcggtggctgctgggcgtagcggtgcgaatatcgcgtttattgcctgcactggcgatgacagcattggtgagagcgttcgccagcagctcgccactgataacatcgatatttctccggtcagcgtgatcaaaggcgaatcaacaggtgtggcgctgatttttgttaatggcgaaggtgagaatgtcatcggtattcatgccggcgctaatgctgccctttccccggcgctggtggaagcgcaacgtgagcgtattgccaacgcgtcagcattattaatgcagctggaatcaccactcgaaagtgtgatggcagcggcgaaaatcgcccatcaaaataagactatcgttgcgcttaacccggctccggctcgcgaacttcctgacgaactgctggcgctggtggacattattacgccaaacgaaacggaagcagaaaagctcaccggtattcgtgttgaaaatgatgaagatgcagcgaaggcggcgcaggtactgcatgaaaaaggtatccgtactgtactgattactttaggaagtcgtggtgtatgggctagcgtgaatggtgaaggtcagcgcgttcctggattccgggtgcaggctgtcgatactattgctgccggagatacctttaacggcgcgttaatcacggcgttgctggaagaaaaaccattgccagaggcgattcgttttgcccatgcagccgctgcgattgccgtaacacgtaaaggcgcacaaccttccgtaccgtggcgtgaagagatcgacgcatttttagacaggcagaggtgacgcttggctacaatgaaagatgttgcccgcctggcgggcgtttctacctcaacagtttctcacgttatcaataaagatcgcttcgtcagtgaagcgattacagccaaagttgaagcggcgattaaagaactcaattacgcgccatcagctctggcgcgtagcctcaaactcaatcaaacacataccattggcatgttgatcactgccagtaccaatcctttctattcagaactggtgcgtggcgttgaacgcagctgcttcgaacgcggttatagtcttgtcctttgcaataccgaaggcgatgaacagcggatgaatcgtaatctggaaacgctgatgcaaaaacgcgttgatggcttgctgttactgtgcaccgaaacgcatcagccttcgcgtgaaatcatgcaacgttatccgacagtgcctaccgtgatgatggactgggctccgttcgatggcgacagcgatcttattcaggataactcgttgctgggcggagacttagcaacgcaatatctgatcgataaaggtcatacccgtattgcctgtattaccggtccgctggataaaactccggcgcgcctgcggttggaaggttatcgggctgcgatgaaacgtgcgggtctcaacattcctgatggctatgaagtcactggtgattttgaatttaacggcgggtttgacgctatgcgccaactgttatcacatccgctgcgtcctcaggccgtctttaccggaaatgacgctatggctgttggcgtttaccaggcgttatatcaggcagagttacaggttccgcaggatatcgcggtgattggctatgacgatatcgaactggcaagctttatgacgccaccattaacaactatacaccaaccgaaagatgaactgggggagctggcgattgatgtactcatccatcggataacccagccgaccctacagcaacaacgatttgaagtggtttactgaatttggccacctgaacagaggtgatatgctcacctcagaacaacacaggtgccataatgaaaaaaagaaatttcagcgcagagtttaaacgcgaatccgctcaactggtcgttgaccagaattacaccgtggcagatgcagccagcgctatggatgtcggcctttccacaatgacgcgatgggtgaaacaattacgtgatgagcggcagggaaaaacaccaaaagcctcccctattaccccggaacaaattgaaatccgtgagctcaggaaaaagctacaacgtattgaaatggaaaatgaaatattaaaaaaggctaccgcgctcttgatgtcagactccctgaacagttctcgataatcgggaaactcagggcgcgttatcctgtggccactctctgccatgtgttcggggtccatcgcagcagctacaaatactggaaaaaccgtcctgaaaagccagacggcagacgggctgtattacgcagccaggtacttgaactgcatggcatcagccacggctctgccggagcaagaagcatcgccacaatggcaacccagagaggctaccagatggggcgctggcttgctggcagactcatgaaagagctggggctggtcagctgtcagcagccgacttaccggtataaacgtggtggtcatgaacatgttgctatccctaactaccttgaacggcagttcgccgtgaccgagccaaatcaggtgtggtgcggtgatgtgacctatatctggacgggtaagcgctgggcgtacctcgccgttgttctcgacctgttcgcaagaaaaccagtgggctgggccatgtcgttctcgccggacagcaggcttaccatgaaagcactggaaatggcatgggaaacccgtggtaagcccgtcggggtgatgttccacagcgatcaaggcagtcattatacgagcaggcagttccggcagttactgtggagataccggatcaggcagagtatgagtcggcgtggaaactgctgggataacagcccaatggagcgcttcttcaggagtctgaagaacgaatgggtgccggcgacgggctatgtaagcttcagcgatgcagctcacgcaataacggactatatcgttggatattacagcgcactaagaccgcacgaatataatggtgggttaccaccaaacgaatcggaaaatcgatactggaaaaaactctaactcggtggccagtttttgttgaccacttcaattacaacttactccgattctgatggaacgtggttcggcttagatttacgctgtcttttgatcaaattattaccatcggttgttttcagtagcatgaacattgctgctgaagcaacagtaataatgcccatcgtgataaacgtatagtggaattgttcgactgtcgttgtgccttccatcccttcgtaaacgcgaaggactgccgcacttacagcaacgcctaaactgatcgacagttgctgcgtgaccgccagaacactgttaccgctgctggcgttgtcatcggtcagatcggcaagtgtgatggtattcatcgcggtaaattgtgtcgacatagccatccctaatataaacaacggcaagatcagcatccatatcgccattgctggtgattgcaaagagaactgagcgatcattagccctataatcaccgtgatccccactaacgtatggcgatagcccagacgacgtaagacttgggtaaccatcgattttgcaataatggaacctaacgctgtcggtgccatcatacagccagcaataaacgcctgatacccaaatcctacctgtaacatcaatggcataaggaacggtacacagccggtccccagacgggttgcaatattgcctacgataccgatcgagaaagtgcgggttttaaataaatctaatgaaattaatgggtttggcgtgcgtcgcgcatggagaatatagagaagcagtaacccgatgctggtgacaattaccgtcaaggcaatccagctggcgacaatcttttccccgaatagctctattccgcttgagaagagaacaaggctgaggccaaacagcaaaaagccagtggtatcgaatctgcgtcgtgcggtggtgaaattgggcatatgtttgtgcgcgtaaagaaggcccgcaatacctatggggatattgattaaaaatatccagtgccaggttgcccaggtgaccagcacgccgccaagaacggggcctaaaattggccccaccagacccggcatggcgacaaaattcaatacaggaagaagctcattacgaggataagcgcgcagtaaggccagccgagcaacaggcatcatcattgcgccgcctatcccctgaataacccggaagacaaccagctgtggtagcgagttagaaagtgcgcaggccagagaacccaacgtgaacagactcacggcaagggtaaatatgcgacgcgtaccgaagcgatcggctagccatccgcttaccggaataagcatcgccaccgtcagcgtataactgatgatggctgattgcatcgcgagaggagaacgattaaggctatgagcgattgcgggtaaggcggtattcagaatagtggcatcaagtgcctgcatgaagaaggccatcgccgcgatccacggcaaacccgccatactgcgcttctttttatcgctcattcaatgtcctgttatcgagttatcacttatctggtgagcgtagcagcgcctgacaagctttaaatgccgcgtcgccatcgctttggataatcgcatcgacaatcgcctggtgcagatccagctttatcactgtgtcgctggtaattgacgtgaagtaagtgtgataaaccgaatggaatagcgaggcgaatgaggtcaaaaacggattggcgctcatttcatagatatgctcatgccaggccatatcgacttcgatccagcgttcacggcgaaagttctcttttaatgccgccatttcggccattaacgtattgagatgcgccttctgttccgcggtgccaacctttgctgccagtaggcaagcttgcggctccagacagatacgcataaccagaaagtgatcgatgacctgatgaaagttctcttctgtcatccaccaggtaagcaattcctgatcaagaaaattccagttcgattgtggcatgactcgggtaccaattcgcggtcgcggtaaaaccatcccttttgccgttaacgttttgaccgcttcgcgtaccgctgtacgactcactccaaattgctcgcccagctcaatctcaccaggcaaaatggtgccgggttcatattcaccttttaagatccgctgcgccagcttctcagccagaacatacgaaaggtttttctgtgcagctaactgttgtgcgcttaaaggcattactaatcttcctttttctttttattccttcttagtatgccaccaggaagtgtgattacggttgcaaaaacggcaaattgcttgttttatggcacattaacggggcttttgctgaaaaaatgcgcgatcagaaaattattttaaatttcctcttgtcaggccggaataactccctataatgcgccaccactgacacggaacaacggcaaacacgccgccgggtcagcggggttctcctgagaacttcggcagggaaagcaaaataaatgcttgactctgtagcgggaaagcgtattatgcacaccccgcgccgttgagaaaaagcgaagcggcactgctctttaacaatttatcagacaatctgtgtgggcactcgaagatacggattcttgacgtcgcaagacgaaaaatgaataccaagtctcaagagtgaacacgtaattcattacgaagtttaattctttgagcatcaaacttttaaattgaagagtttgatcatggctcagattgaacgctggcggcaggcctaacacatgcaagtcgaacggtaacagaaagcagcttgctgctttgctgacgagtggcggacgggtgagtaatgtctgggaaactgcctgatggagggggataactactggaaacggtagctaataccgcataacgtcgcaagaccaaagagggggaccttcgggcctcttgccatcggatgtgcccagatgggattagctagtaggtggggtaaaggctcacctaggcgacgatccctagctggtctgagaggatgaccagccacactggaactgagacacggtccagactcctacgggaggcagcagtggggaatattgcacaatgggcgcaagcctgatgcagccatgccgcgtgtatgaagaaggccttcgggttgtaaagtactttcagcggggaggaagggagtaaagttaatacctttgctcattgacgttacccgcagaagaagcaccggctaactccgtgccagcagccgcggtaatacggagggtgcaagcgttaatcggaattactgggcgtaaagcgcacgcaggcggtttgttaagtcagatgtgaaatccccgggctcaacctgggagctgcatctgatactggcaagcttgagtctcgtagaggggggtagaattccaggtgtagcggtgaaatgcgtagagatctggaggaataccggtggcgaaggcggccccctggacgaagactgacgctcaggtgcgaaagcgtggggagcaaacaggattagataccctggtagtccacgccgtaaacgatgtcgacttggaggttgtgcccttgaggcgtggcttccggagctaacgcgttaagtcgaccgcctggggagtacggccgcaaggttaaaactcaaatgaattgacgggggcccgcacaagcggtggagcatgtggtttaattcgatgcaacgcgaagaaccttacctggtcttgacatccacggaagttttcagagatgagaatgtgccttcgggaaccgtgagacaggtgctgcatggctgtcgtcagctcgtgttgtgaaatgttgggttaagtcccgcaacgagcgcaacccttatcctttgttgccagcggtccggccgggaactcaaaggagactgccagtgataaactggaggaaggtggggatgacgtcaagtcatcatggtccttacgaccagggctacacacgtgctacaatggcgcatacaaagagaagcgacctcgcgagagcaagcggacctcataaagtgcgtcgtagtccggattggagtctgcaacttcgactccatgaagtcggaatcgctagtaatcgtggatcagaatgccacggtgaatacgttcccgggccttgtacacaccgcccgtcacaccatgggagtgggttgcaaaagaagtaggtaggagggtgcttctttgtgatttatagtcgtaacaaggtaaccgtaggggaacctgcggttggatcacctccttaccttaaagaagcgtactttgcagtgctcacacagattgtctgatagaaagtgaaaagcaaggcgtcttgcgaagcagactgacacgtccccttcgtctagaggcccaggacaccgccctttcacggcggtaacaggggttcgaatcccctaggggacgccacttgctggtttgtgagtgaaagtcacctgccttaatatctcaaaactcatcttcgggtgatgtttgagatatttgctctttaaaaatctggatcaagctgaaaattgaaacactgaacaacgagagttgttcgtgagtctctcaaattttcgcaacacgatgatgaatcgcaagaaacatcttcgggttgtgaggttaagcgactaagcgtacacggtggatgccctggcagtcagaggcgatgaaggacgtgctaatctgcgataagcgtcggtgaggtgatatgaaccgttataaccggcgatttccgaatggggaaacccagtgtgtttcgacacactatcattaactgaatccataggttaatgaggcgaaccgggggaactgaaacatctaagtaccccgaggaaaagaaatcaaccgagattcccccagtagcggcgagcgaacggggaggagcccagagcctgaatcagtgtgtgtgttagtggaagcgtctggaaaggcgtgcgatacagggtgacagccccgtacacaaaaatgcacatattgtgagctcgatgagtagggcgggacacgtggtatcctgtctgaatatgggagggaccatcctccaaggctaaatactcctgactgaccgatagtgaaccagtaccgtgagggaaaggcgaaaagaaccccggcgaggggagtgaaaaagaacctgaaaccgtgtacgtacaagcagtgggagccttttgtataatgggtcagcgacttatattctgtagcaaggttaaccgaataggggagccgaagggaaaccgagtcttaactgggcgttaagttgcagggtatagacccgaaacccggtgatctagccatgggcaggttgaaggttgggtaacactaactggaggaccgaaccgactaatgttgaaaaattagcggatgacttgtggctgggggtgaaaggccaatcaaaccgggagatagctggttctccccgaaagctatttaggtagcgcctcgtgaattcatctccgggggtagagcactgtttcggcaagggggtcatcccccgctcgccggaagaccaagggttcctgtccaacgttaatcggggcagggtgagtcgacccctaaggcgaggccgaaaggcgtagtcgatgggaaacaggttaatattcctgtacttggtgttactgcgaaggggggacggagaaggctatgttggccgggcgacggttgtcccggtttaagcgtgtaggctggttttccaggcaaatccggaaaaccaaggctgaggcgtgatgacgaggcactacggtgctgaagcaacaaatgccctgcttccaggaaaagcctctaagcatcaggtaacatcaaatcgtaccccaaaccgacacaggtggtcaggtagagaataccaaggcgcttgagagaactcgggtgaaggaactaggcaaaatggtgccgtaacttcgggagaaggcacgctgatatgtaggtgaagcgacttgctcgtggagctgaaatcagtcgaagataccagctggctgcaactgtttattaaaaacacagcactgtgcaaacacgaaagtggacgtatacggtgtgacgcctgcccggtgccggaaggttaattgatggggttagcggcaactgcaactgtttattaaaaacacagcactgtgcaaacacgaaagtggacgtatacggtgtgacgcctgcccggtgccggaaggttaattgatggggttagcggcaacgcgaagctcttgatcgaagccccggtaaacggcggccgtaactataacggtcctaaggtagcgaaattccttgtcgggtaagttccgacctgcacgaatggcgtaatgatggccaggctgtctccacccgagactcagtgaaattgaactcgctgtgaagatgcagtgtacccgcggcaagacggaaagaccccgtgaacctttactatagcttgacactgaacattgagccttgatgtgtaggataggtgggaggctttgaagtgtggacgccagtctgcatggagccgaccttgaaataccaccctttaatgtttgatgttctaacgttggcccgtaatccgggttgcggacagtgtctggtgggtagtttgactggggcggtctcctcctaaagagtaacggaggagcacgaaggttggctaatcctggtcggacatcaggaggttagtgcaatggcataagccagcttgactgcgagcgtgacggcgcgagcaggtgcgaaagcaggtcatagtgatccggtggttctgaatggaagggccatcgctcaacggataaaaggtactccggggataacaggctgataccgcccaagagttcatatcgacggcggtgtttggcacctcgatgtcggctcatcacatcctggggctgaagtaggtcccaagggtatggctgttcgccatttaaagtggtacgcgagctgggtttagaacgtcgtgagacagttcggtccctatctgccgtgggcgctggagaactgaggggggctgctcctagtacgagaggaccggagtggacgcatcactggtgttcgggttgtcatgccaatggcactgcccggtagctaaatgcggaagagataagtgctgaaagcatctaagcacgaaacttgccccgagatgagttctccctgactccttgagagtcctgaaggaacgttgaagacgacgacgttgataggccgggtgtgtaagcgcagcgatgcgttgagctaaccggtactaatgaaccgtgaggcttaaccttacaacgccgaagatgttttggcggatgagagaagattttcagcctgatacagattagattaaccggcgacaagcgggttaatggaacagaatttgcctggcggccttagcgcggtggtcccacctgaccccatgccgaactcagaagtgaaacgccgtagcgccgatggtagtgtggggtctccccatgcgagagtagggaactgccaggcatcaaatttagcagtaagccggttataaaccggtggttgtaaaagaattcggtggagcggtagttcagtcggttagaatacctgcctgtcacgcagggggtcgcgggttcgagtcccgtccgttccgccaccctaattaggggcgtagttcaattggtagagcaccggtctccaaaaccgggtgttgggagttcgagtctctccgcccctgccagaaatcatccttagcgaaagctaaggattttttttatctgaaataaccctctccgaagtaactccttctaccggcatccttgccagccattcagattaatacacttcatccagcacgttaattttcaatagatcgcgaatcaacgcatttttatcgctattttgtagccatatggcataaagcggccgtgaaagtgttgtgctatcgacaacggtatgcaggccgccttttttacgtgcccaactgacgggtagccaggtgcaaccattaagcatcgcaatctgttgctgtgccagttcagcagaactggttgtcagaatgggaacttcgtcagcaccgatcaaacctgcctcatgctgttgaaaatctggcccccactctagtcgcagatagttaagatctccctttagtttagaaggggcactggtataaagcgctaaagtgaaataccccagcaactgactacaaaattcgtccattttgggggcttcagttgtaataagaagatcaagttggcgttcatgcaactgttttaccagagactgccgttgggcaattcgcgcttcgaactgtaagcctgtatggacatcctgattttgatacaagcgtcccagccactgattaagcatacactcccacagcgaggcgctggcaccgatagaaaactcattatgtcgtgaggtatgcgccacctccttgcgggcggcctgccaggtgctcatgagcgtttctgcataaggcagaagcttttctccggcagcggttaaacggatattgtttctgtggcgggtgaaaagattcacacccagttgattttccagttgtctgattcgaaagctcacggctgattgggtcagatagagcgattcagccgctcgaccaaagtgacgcgttcggctaacttccaggaaagtttttaacaattccgtatccacagtgctctccgcaaaattatttgtcgttatgatttaaatgttttgttttacactctgtcaagcgtaactaatactccgcgccataactagctcggtcaaagaattaggagcgtgcaggatggcggaaagctttacgacgactaatcgatatttcgacaataaacattatccacgtggattctctcgtcatggtgacttcaccatcaaagaggcacaactgcttgagcgtcatggttatgccttcaatgagttggatcttggcaaacgcgagccggttaccgaggaagagaaactcttcgtagcagtatgccgtggcgaacgtgaaccagtgacagaagcagaacgcgtgtggtccaagtatatgacgcgtatcaagcgtccaaaacgttttcacaccctttccggcggtaaaccgcaggttgaaggtgctgaagactacaccgattctgacgattaataaaaagggcgaaatgccctttttttatgtcagtagtttttgcagatggatgagcaaacggtcaatcgcacgatagctaactgcctcctgcaaatgctgacgtgtgataatgtcagactgatcaatatcagcaatggttcgtgcaactttcaataaccgctgccaggcacgaatcgataaccccagatggatcagcgtttcttccagccactgcgcatcttcgctttcaagcttgcagaattggcgtatttccggattatccagccaggcgttcagtttattctgccgcttaaattggcgctctctggcggccattacacgttgtttaacggtggtgctgttttctcccggcactaccgttttactcaaaatgccggggggcggtaatgggatctccagtgagagatcgaagcggtcgagaaagggccccgagagccggttgagataacgtaatgtctgttctggtgtgcagcggttatggtttccctgataatgtccggtagggctgggattcattgccgcgacaagctggaaacgggctggataggttatttttgctcgtgtgcgtgaaagatggatctgcccggattcaatcggctctcgcaaggcatccagtgtacgccgttcaaattcaggtagctcatcaagaaaaagcacgccgttatgcgccagcgaaatttcacctggccctggaattgcaccaccgcccaccatcgcagttaacgacgcactgtgatgaggtgagcggaacgggcgctgccgccattgtttttgtactgattcagcatttaccagacttaatatcgcagcgctctccagtgcctcttcattgcttaaatctggcaaaaggccattaatacggctggcgagcattgttttacctgttcccggcggtccaatcagtaaaaggttgtgcccgccagcggcggtaatttccagtcctcgctttccttgctcctgaccgacaacatcactgagatcatgttgtagcgcccgggatactgcattagttggtttcgggtgttcgagagcgtgcttaccttccagaaacgcgcagacagcctgcagatgatcggctatcaggcatccttcaccgttaattagccccacttcatcttcgttatctttcgcgacgataatttttctgcccgacttaatagcttcagttgcactggagattgcgccgggaacgccacgcagagcgcctgtaagcgccagttctccgactaattcatattcatctaacttattggctgtaagctgttctgaggccgccagtaacgcaatagccgataggcaaatcatatcgtcccccttcttttggcagatcggctggagcaaggttgatggtgatttttttcgccggatattcatatccgctattgataatggcgctgcgcacgcgatcgcgagcttcttttaccgttgtttctggtaagcccaccatcgttaagcctggtagacctttactgatatgtacctcaacagtgattgggggcgcatttactcccagggctgcgcgggtatgaacaattgacagtgacataagccctccttgagtcaccattatgtgcataagatatcgctgctgtagcccgctaattcgtgaattttagtggctgattcctgtttatttgtgcaagtgaagttgagttgttctggcggtggaatgatgctcgcaaaaatgcagcgtgcaaaggatgaactacgaggaagggaacaacattcatactgaaattgaatttttttcactcactattttctttttaaaaaacaacaatttctcttgaaattattaaagacatcataaaaatcggccaaaaaatatcttgtgctattcgcaaaatctatggtaactctttaggcattccttcgaacaagatgcaagaaaagacaaaatgacagcccttctacgagtgattagcctggtcgtgattagcgtggtggtgattattatcccaccgtgcggggctgcacttggacgaggaaaggcttagagatcaagccttaacgaactaagacccccgcaccgaaaggtccgggggttttttttgaccttaaaaacataactgaggagcagacaatgaataacagcacaaaattctgtttctcaagattcaggacggggaactaactatgaatggcgcacagtgggtggtacatgcgttgcgggcacagggtgtgaacaccgttttcggttatccgggtggcgcaattatgccggtttacgatgcattgtatgacggtggcgtggaacacttgctgtgccgacacgagcaaggtgcagcaatggcggctatcggttatgcccgtgctaccggcaaaactggcgtttgcatcgccacgtctggtccaggtgcaaccaacctgataaccgggcttgcggacgcgctgttagattccatccccgttgttgctatcaccggtcaggtatccgcaccgtttatcggcactgacgcatttcaggaggtggatattctggggttgtcgttagcctgcaccaagcacagtttcctggtgcaatcactggaagagttaccgcgtatcatggccgaagcgtttgacgtcgccagctctggtcgtcctggtccggttttggtcgatattccaaaagatatccagttagccagcggcgatctggaaccgtggttcaccactgttgaaaacgaagtgactttctcacatgccgaagtcgagcaagcgcgtcagatgctggcaaaagcgcaaaaaccgatgctgtacgttggcggtggcgtgggcatggcgcaggcagtttcggctttgcgtgaatttctcgctgccacaaaaatgcctgccacctgtacgttgaaagggctgggcgcagtagaagcagattatccgtactatctgggcatgctggggatgcacggcaccaaagcggcgaacttcgcagtgcaggagtgcgatctactgatcgccgtgggcgcacgttttgatgaccgggtgactggcaaactgaacaccttcgcaccacacgccagcgttatccatatggatatcgatccggcagaaatgaacaagctgcgtcaggcacatgtggcattacagggtgatttaaatgctctgttaccagcattacagcagccgttaaatatcgatgactggcagcaacactgcgcgcaactgcgtgatgaacatgcctggcgttacgaccatcctggtgacgctatctacgcgccgttgttgttaaaacaactgtcggatcgtaaacctgcggattgcatcgtgaccacagatgtggggcagcaccagatgtgggctgcccagcacatcgtccacactcgcccggaaaacttcatcacctccagcggcttaggcaccatgggtttcggtttaccggcggcggttggcgcacaagtcgcgcgaccgaacgatactgtcgtctgtatctccggtgacggctctttcatgatgaatgtgcaagagctgggcaccgtaaaacgcaagcagttaccgttgaaaatcgtcttactcgataaccaacggttagggatggttcgacaatggcagcaactgtttttccaggaacgatacagcgaaaccacccttaccgataaccccgatttcctcatgttagccagcgccttcggcatccctggccaacacatcacccataaagaccaggttgaagcggcactcgacaccatgctgaacagtgatgggccatacctgcttcatgtctcaatcgacgaacttgagaacgtctggccgctggtgccgcctggtgccagtaattctgaaatgttggagaaattatcatgatgcaacatcaggtcaatgtatcggctcgcttcaatccggaaaccttagaacgtgttttacgcgtggtgcgtcatcgtggtttccacgtctgctcaatgaatatggccgccgccagcgatgcacaaaatataaatatcgaattgaccgttgccagcccacggtcggtcgacttactgtttagtcagttaaataaactggtggacgtcgcacacgttgctatctgccagagcacaaccacatcacaacaaatccgcgcctgagcgcaaaaggaatataaaaatgaccacgaagaaagctgattacatttggttcaatggggagatggttcgctgggaagacgcgaaggtgcatgtgatgtcgcacgcgctgcactatggcacctcggtttttgaaggcatccgttgctacgactcgcacaaaggaccggttgtattccgccatcgtgagcatatgcagcgtctgcatgactccgccaaaatctatcgcttcccggtttcgcagagcattgatgagctgatggaagcttgtcgtgacgtgatccgcaaaaacaatctcaccagcgcctatatccgtccgctgatcttcgttggtgatgttggcatgggcgtaaacccgccagcgggatactcaaccgacgtgattatcgccgctttcccgtggggagcgtatctgggcgcagaagcgctggagcaggggatcgatgcgatggtttcctcctggaaccgcgcagcaccaaacaccatcccgacggcggcaaaagccggtggtaactacctctcttccctgctggtgggtagcgaagcgcgccgccacggttatcaggaaggtatcgcgttggatgtgaatggttacatctctgaaggcgcaggcgaaaacctgtttgaagtgaaagacggcgtgctgttcaccccaccgttcacctcatccgcgctgccgggtattacccgtgatgccatcatcaaactggcaaaagagctgggaattgaagtgcgtgagcaggtgctgtcgcgcgaatccctgtacctggcggatgaagtgtttatgtccggtacggcggcagaaatcacgccagtgcgcagcgtagacggtattcaggttggcgaaggccgttgtggcccggttaccaaacgcattcagcaagccttcttcggcctcttcactggcgaaaccgaagataaatggggctggttagatcaagttaatcaataaatacaaaaaatgggacggcacgcaccgtcccatttacgagacagacactgggagtaaataaagtatgcctaagtaccgttccgccaccaccactcatggtcgtaatatggcgggtgctcgtgcgctgtggcgcgccaccggaatgaccgacgccgatttcggtaagccgattatcgcggttgtgaactcgttcacccaatttgtaccgggtcacgtccatctacgcgatctcggtaaactggttgccgaacaaattgaagcggctggcggcgttgccaaagagttcaacaccattgcggtggatgatgggatcgctatgggccacgggggcatgctttattcactgccatctcgcgaactgatcgctgattccgttgaatatatggtcaacgcccactgcgccgacgccatggtctgcatctctaactgcgacaaaatcaccccggggatgctgatggcttccctgcgcctgaatattccggtgatctttgtttccggcggcccgatggaggccgggaaaaccaaactgtccgatcagatcattaagctcgatctggttgatgcgatgatccagggcgcagacccgaaagtttctgactcccagagcgctcaggttgaacgatccgcctgcccaacctgcggttcctgctccgggatgtttactgctaactcaatgaactgcctgaccgaagcgctgggcctgtcgcagccgggcaacggctcgctgctggcaacccacgctgatcgcaagcaactgttcctcaatgctggtaaacgcattgttgaattgaccaaacgttactacgaacaggatgatgaaagcgcactgccgcgtaacatcgccagtaaggcggcgtttgaaaacgccatgacgctggatatcgcgatgggcggctctaccaacaccgttcttcacctactggcggcggcgcaggaagcggaaatcgacttcaccatgagtgatatcgataagctctcccgcaaagtaccgcagctgtgtaaagttgcgccgagcacccaaaaataccatatggaagatgttcaccgtgctggtggtgttatcggtattctcggcgagctggatcgcgcggggttactgaaccgtgatgtgaaaaacgtacttggcctgacgttgccgcaaacactggaacaatacgacatcgtcgtgacccaggatgatgcggtaaaaaatatgttccgcgctggccctgcgggcattcgtactacacaggcattctcgcaggattgccgctgggatacgctggacgacgatcgctccaatggctgtatccgctcgctggaacacgcctacagcaaagacggcggtctggcggtgctctacggtaatttcgcagaaaacggctgcatcgtgaaaaccgcaggcgtcgatgacagcatcctaaaattcaccggcccggcgaaagtgtacgaaagccaggacgacgcggtagaagcgatcctcggtggcaaagttgtcgcgggcgatgtggtggtgatccgctatgaaggcccgaaaggcggccctggcatgcaggaaatgctctacccaaccagcttcctgaaatcaatggggctcggcaaagcctgtgcgctgatcaccgatggacgcttctccggcggcacctctggtctttccatcggccacgtctcgccggaagcggcaagcggcggcagcattggcctgattgaagatggtgacctgatcgctatcgatattccgaaccgaggcattcagttacaggtaagcgatgccgaactggcggcgcgtcgtgaagcgcaggaagcccgtggcgacaaagcctggacgccgaaaaaacgtgaacgtcaggtttcctttgccctgcgtgcctacgccagcctggcaaccagcgccgacaaaggcgcggtgcgcgataaatcgaaactggggggttaatgatggcagactcacaacccctgtctggtgctccggaaggcgccgaatatttaagagcggtactacgtgcaccggtttacgaggcggcgcaggtcacgccgctacaaaaaatggaaaagctctcgtcgcgtcttgataacgtgattctggtgaagcgcgaagatcgccagccggtacacagctttaagctgcgcggtgcatacgccatgatggcgggcctgacggaagaacaaaaagcgcatggcgtgatcactgcctcggcgggtaatcacgcgcagggcgtcgcgttttcttccgcacggttaggcgtgaaggcgctgatcgtcatgccaaccgccaccgccgatatcaaagttgatgcggtacgcggctttggcggcgaagtgttgcttcatggcgcgaactttgacgaagcaaaagcgaaagcgatcgaactgtcacagcagcagggcttcacctgggtgccaccgttcgaccacccgatggtgatcgctgggcaaggcacgctggcgctggaactgctccagcaggatgcccatcttgaccgcgtgtttgtgccggtcggcggcggcggtctggcggcgggtgtggcggtgctgatcaaacaactgatgccgcaaatcaaagtgatcgccgttgaagcggaagactccgcctgcctgaaagcggcgctggatgcgggtcatcctgtggatctgccgcgcgtggggctgtttgctgaaggcgttgcggtaaaacgcattggcgacgaaaccttccgtttgtgccaggagtatctcgacgacatcatcaccgtcgatagtgatgcgatctgtgcggcgatgaaggatttattcgaagatgtacgtgcggtggcggaaccctctggcgcgctggcgctggcagggatgaaaaaatatatcgcccagcataatattcgcggcgaacgcctggcgcatattctttccggtgccaacgtgaacttccacggcctgcgctacgtctcggaacgttgcgaactgggcgaacagcgtgaagcgttgttggcggtgaccatcccggaagtgaagggcagcttcctcaaattctgccaactgcttggcgggcgctcggtcaccgagttcaactaccgttttgccgatgccaaaaacgcctgcatttttgttggcgtgcgcctgagccgcggcctcgaagagcgcaaagaaattttgcagatgctcaacgatggcggctacagcgtagtggatctctccgacgacgaaatggcgaagctgcatgtgcgctatatggtcggcgggcgtccgtcgcatccgttgcaggaacgcctctacagcttcgaattcccggaatcgccgggcgcgctgttgcgcttcctcaacacgctgggtacgcactggaacatttctttgttccactatcgcagccatggcaccgactacgggcgcgtactggcggcgttcgaacttggcgaccatgaaccggatttcgaaacccggttgaatgagttgggttacgattgccacgacgaaaccaataacccggcgttcaggttctttttggcgggttaatggttcggcaaaatcttccagaatgcctcaatcagcggctcatgtagccgctttttctgcacacacacgcccagttcaaacggcgttttttcatcactgcgctctaaaatcatcacgcggttacgcaccggttccgggctgttttccagcaccacttccggcaacaaggctacgccacagccgagcgctaccatcgacaccatcgcttcatgcccgccgaccgtagcgtaaatcatcgggttgctgattttgttgcgtcgaaaccacagttcaatgcgccggcgcaccggtccctgatcggccatgataaacggcactgtagaccagtccggcttatctgccgaaacttggttacgcaccgggcagggtagcgcaggggcaatcagcactactgccagattctccagcatcgaaaatgccactgcgccgggcagagtctccggtttcccggcaatcgccagatccgcttcgccagtgacgaccttttccatcgcatctgccgcatcaccagtcgtgagtttaatctccaccgacgggtgttccgcgcggaagcgatcgagaatcggcggcagatggctgtaggcagcggtcaccgagcagaagatatgtaattcgccagagagcgacggtccttgctgatcgatggtgtggcgcagctgttgatactgcaacagcgtttgctgggcgaaaacgcgcagttcttcgcccgcttccgtcagcgttaccgtgcggttatcacgcacaaacagcggctgaccgagatcttcttccaggcgctgtatttgtcgcgaaagcgtagacgggctaacgtgcattgcccgcgcgctgcggccaaaatggcggctttccgccagatgcaggaaggttttcagatcgcgtaaatccaatggcgcagcccttaatgttgacgttgcagaaattgcaatgtgacgttgtgaatatatcaatttccgcaataaatttcctgtcatatagtgaattcaatctcgcaaacgcgaaccgaacaataagaagcacaacatcacgaggaatcaccatggctaactacttcaatacactgaatctgcgccagcagttggcacagctgggcaaatgtcgctttatggggcgcgatgaattcgccgatggcgcgagctaccttcagggtaaaaaagtagtcatcgtcggctgtggcgcacagggtctgaaccagggcctgaacatgcgtgattctggtctcgatatctcctacgctctgcgtaaagaagcgattgctgagaagcgcgcatcctggcgtaaagcaaccgaaaatggttttaaagtgggtacttacgaagaactgatcccgcaggcggatctggtggttaacctgacgccggacaagcagcactctgatgtagtgcgcaccgtacagccactgatgaaagacggcgcggcgctgggctactctcatggtttcaatatcgtagaagtgggtgagcagatccgtaaagacatcaccgtcgtaatggttgcgccgaaatgccctggcaccgaagtacgtgaagagtacaaacgtggattcggcgtaccgacgctgattgccgttcacccggaaaacgatccgaaaggcgaaggcatggcgatcgctaaagcatgggcggctgcaaccggcggtcaccgtgcgggcgttctggaatcctctttcgttgcggaagtgaaatctgacctgatgggcgagcaaaccatcctgtgcggtatgttgcaagctggttctctgctgtgcttcgacaagctggtggaagaaggcaccgatccggcatacgcagaaaaactgattcagttcggttgggaaaccatcaccgaagcgctgaaacagggcggcatcaccctgatgatggaccgtctttctaacccggcgaaactgcgtgcttacgcgctttctgagcaactgaaagagatcatggcgccgctgttccagaaacatatggacgacatcatctccggcgaattctcctccggcatgatggctgactgggccaacgacgataagaaactgctgacctggcgtgaagagactggcaaaaccgcattcgaaaccgcgccgcagtatgaaggcaaaatcggtgaacaggagtacttcgataaaggcgtactgatgatcgcgatggtaaaagcaggcgttgagttggcgtttgaaaccatggttgattccggcatcatcgaagaatctgcttactatgaatcactgcacgaactgccgctgattgccaacaccatcgcccgtaagcgtctgtacgaaatgaacgtggttatctccgatactgccgagtacggtaactatctgttctcttacgcttgtgtgccactgctgaaaccgtttatggcagagctgcaaccgggcgacctgggtaaagctattccggaaggtgcggtagataacgcgcagctgcgtgatgtaaatgaagcgattcgcagccatgcgattgagcaggtaggtaagaaactgcgcggctatatgacggatatgaaacgtattgctgttgcgggttaatagcgattcagagttcaaggccttctcccggagaaggcctttctgttagttacggtacagcactttaatgatgtggtaaccgaactgggtatgcagcgggccggttggctccagtaccggacaagagaaaaccactttatcgaacgccggaaccatttgaccctggcggaattcacccaaatcaccgccgcgtttgcctgacgggcaaatggagtgtttcttcgccagcttgccgaaatcggcaccattcttgatctgctcgagaagatccagagccagtttctcttcttttacaaggatatgcagtgctgctgctgtttttgccatgatcgtgccttgagtggtaaggatgaggctggctatactaccacgctgttattttcccctcccgactttcattgagcgattttcctatgcgtctaaaccccggccaacaacaagctgtcgaattcgttaccggcccctgcctggtgctggcgggcgcgggttccggtaaaactcgtgttatcaccaataaaatcgcccatctgatccgcggttgcggttatcaggcgcgacatatcgcggcggtgacctttaccaataaggcggcacgcgagatgaaagagcgtgtcgggcagacgctggggcgcaaagaggcgcgtgggctgatgatttccaccttccacacgctggggctggatatcatcaaacgcgagtatgcggcgctggggatgaaggctaacttttcgctgtttgacgataccgatcagcttgctttgcttaaagagttgaccgaggggctgattgaagatgacaaagttctcctgcaacagctaatttcgaccatctccaactggaagaacgatctcaaaacaccggcgcaggcggcggcagaggcaaagggcgagcgggaccgtatttttgcccattgttatgggctgtatgatgcacacctgaaagcctgtaacgttctcgacttcgatgatctgattttattgccgacgttgctgctgcaacgcaatgaagaagtccgcgagcgctggcagaacaaaattcgctacctgctggtggatgagtatcaggacaccaacaccagccagtatgaactggtgaaactgctggtgggcagccgcgcgcgctttaccgtagttggcgatgacgatcagtcgatctactcctggcgcggtgcacgtccgcaaaacctggtgctgttgagtcaggatttcccggcactgaaggtgattaagcttgagcagaactaccgctcttccggacgtattctgaaagcggcgaacatcctgatcgccaataacccgcacgtctttgaaaagcgtctgttctccgaactgggctatggcgcggagctaaaagttttaagcgcgaataacgaagaacatgaagccgagcgcgtcaccggcgagctgatcgcccatcacttcgtcaataaaacgcagtacaaagattacgccattctttatcgcggcaaccatcagtcgcgggtgtttgaaaaattcctgatgcaaaaccgcatcccgtacaaaatttctggtggtacgtcgtttttctctcgtcctgaaatcaaggatttgctggcttatctgcgcgtgctgactaacccggacgatgacagcgcatttctgcgtatcgttaacacgccgaagcgagagattggcccggctacgctgaaaaagctgggtgagtgggcgatgacgcgcaataaaagcatgtttaccgccagctttgatatgggcctgagtcagacgcttagcggacgtggttatgaagcattgacccgcttcactcactggttggcagaaatccagcgcctggcggagcgagagccgattgccgcggtgcgtgatctgatccacggcatggattatgaatcctggctgtacgaaacatcgcccagcccgaaagctgccgaaatgcgcatgaagaacgtcaaccaactgtttagctggatgacggagatgctggaaggcagcgaactggatgagccgatgacgctcacccaggtggtgacgcgctttactttgcgcgacatgatggagcgcggcgagagcgaggaagagctggatcaggtgcaactgatgactctgcacgcgtcgaaagggctggagtttccctatgtctacatggttggtatggaagaagggtttttgccccaccagagcagcatcgatgaagacaatattgatgaggagcggcggctggcctatgtcggcattacccgcgcccagaaggaattgacctttacgctgtgtaaagaacgccgtcagtacggcgaactggtgcgcccggagccgagccgcttcctgctggagctgccgcaggatgatttgatttgggaacaggagcgcaaagtggtcagcgccgaagaacggatgcagaaagggcaaagccatctggcgaatctgaaagcgatgatggcggcaaaacgagggaaataatcaaggccggaaaagatgtgtcagcatcgcatccggcacttactcattaatgcacttccagcggccagtggacatagctctgccactggctttcctgatcaataatctctttacccagcggatgttgggttagccaaccttgcggaagcgtcaaggtcaacagttcatggttagcctgtaatgtcatctctggcacgagatcgtcacggcgacggctggcaaaaatgatagccaggcggagtaaacggcagagttgttctgcgacgcgcggtggtacggcattttgctgatgcagcgatgagagatcgaccggattagtctggttgagcagtagcgtcgccagcagttttttctgtgcgggggtaaaaccgggaagatccagattacgtaccagataagcagcgtgttgcggcgcttgtttgaagtcaacgctcaggccgatttcatgaagctgacaggcgctgatgagcaaatcgcggcttattgcttcaagatgccattcattttccacctgatcgtagaagttagccgcaactttggctacgcgctgtgcctgatcaatatcgatcataaagcggcgctgaatattacgcagcgtacggctgcgaatatcctgctcgacggtaagatgcaacataccgtagaccaggccttcacgcagcgcaccgcccgccagggtcatacactgaatattcagttcggtaaaaatggctatcaggatcgccagaccactcgggaacactaacgcacgttccagcgtcagcccgtcaatctctagctcttccagccgaccgcaatgaatggcgcgttgtttcagttgctgcaacttttccagggtaatgcgttcatccatcccctgtgccatcatgatttcctgtaacgcctgcacggtgccggaagcgccaacgcacactttccagccgtgataccgtaattcatcggcaaccggacgtaacacttcgcgtgccgctttttctgcagcatcaaaattttcctgccccagattacgatcggcaaaatagcgttccagccaggtaacgcagcccatcgacaggctgaacaaagaggtggtttgtgcacccgtgccggttaccagttcagtactggctccgccgatatccaccaccaggcgctgatcggcaccgccagtggtgtgagcaacgccctgataaatcagacgcgcttcctcttcaccgctgatcacctgtaccggacaaccgaggatttcctgcgctttggcaataaaatcacccgcattgacggcaaggcgtaatgtcgccgtagcgacaacgcgaatttgcgagggagggatatcttgcagacgttcagcaaacaggcgcagacattgccaaccgcgctccattgcttcattagacagggcattttcgctattcaggccggcagccagacgcactttgcgttttattcgcgtcagcgtctggatgcttccagccacctcgcgcacaaccagcatatgaaaactattcgaaccgagatcaatggctgcatacagcgacgaggtggaacccatactcttcatccttcaatctgtctctgcgttggctgcattccttcacctgaatcacttacgacagtaagcgcatcgggattcattctcttgccatcttgatacagcttgaatgatttggagtatgacattttttctttaacctgaacgacgacgattacgcggagcgccagtacgacgcggaccattgcctgtgcgcgggcgcgtgaggcgcagcggttttggcagatcggtcatcaatgcgtccggattgtatttacttaccggaattgagtgaccaatataggtctcaatagcaggcaaattcaatgcatactcttcacacgccaggctaatagagtgaccgcttgcgcctgcgcgacctgttcgaccaatacggtgaacgtaatcttcacagtcatcgggtaaatcgtagttaaagacgtgtgtcacagcaggaatatgcaaaccacgcgcggcaacgtcggtggcaaccagaatatccagatccccacgggtaaattcatcaagaatacgcagacgttttttctgcgcgacatcgcctgtcaataaaccgacacgatgaccatctgccgccaggtggccccagatctcttcacaacggtgtttggtgttggcgaaaataatcgctctgtctggccactcttcttcgatcagcgtttgcagcaaacgcattttttcttcgttagaagggtagaaaagctcttctttaatacgatggcccgttttctgttccggttccacttcaatatattcggcattgttcatctgctcgaacgccagttcacgtacccggtacgaaagcgtggcggagaacagcatgttgaggcgctggtttgcaggcggcatacggcggaacagccagcggatatctttaataaagcccagatcgtacatgcgatcggcttcgtccagtaccaccacctgaatggcaccgaggttaatgtggttctgcttggcgtagtcaattaaacgacccgtggtgccaatcagaatgtcaacgccgctttccagcactttcagctgtttgtcgtagccatcaccaccgtaagccagacccagcttcaggccagtagcttccgccagcggttccgcgtcggcatggatctgcacggcaagttcacgcgtcggtgccataattaaggcacgcggttgattcaccttgcgatcggcaatcgcgggatgagagagaagataatgaaacgttgacgtaagaaacgccatcgttttcccggtaccggtttgcgcctgcccggctacgtcacgacccgccagcgtcagcggaagggccagtgcctgaatgggcgtacagttatgaaacccttttttttcaagggcttctacaaccttcggatgcagggcgaagtcggaaaacttctgttctgttaaatgtgttttgctcatagtgtggtagaatatcagcttactattgctttacgaaagcgtatccggtgaaataaagtcaacctttagttggttaatgttacaccaacaacgaaaccaacacgccaggcttattcctgtggagttatatatgagcgataaaattattcacctgactgacgacagttttgacacggatgtactcaaagcggacggggcgatcctcgtcgatttctgggcagagtggtgcggtccgtgcaaaatgatcgccccgattctggatgaaatcgctgacgaatatcagggcaaactgaccgttgcaaaactgaacatcgatcaaaaccctggcactgcgccgaaatatggcatccgtggtatcccgactctgctgctgttcaaaaacggtgaagtggcggcaaccaaagtgggcgcactgtctaaaggtcagttgaaagagttcctcgacgctaacctggcgtaagggaatttcatgttcgggtgccccgtcgctaaaaactggacgcccggcgtgagtcatgctaacttagtgttgacttcgtattaaacataccttattaagtttgaatcttgtaatttccaacgcttcccgttttatcttaaatgcgaagtgaacagatttctggctcgtcactcaatccgtcttgtcgtttcagttctgcgtactctcctgtgaccaggcagcgaaaagacatgagtcgatgaccgtaaacaggcatggatgatcctgccataccattcacaacattaagttcgagatttaccccaagtttaagaactcacaccactatgaatcttaccgaattaaagaatacgccggtttctgagctgatcactctcggcgaaaatatggggctggaaaacctggctcgtatgcgtaagcaggacattatttttgccatcctgaagcagcacgcaaagagtggcgaagatatctttggtgatggcgtactggagatattgcaggatggatttggtttcctccgttccgcagacagctcctacctcgccggtcctgatgacatctacgtttcccctagccaaatccgccgtttcaacctccgcactggtgataccatctctggtaagattcgcccgccgaaagaaggtgaacgctattttgcgctgctgaaagttaacgaagttaacttcgacaaacctgaaaacgcccgcaacaaaatcctctttgagaacttaaccccgctgcacgcaaactctcgtctgcgtatggaacgtggtaacggttctacggaagatttaaccgctcgcgtactggatctggcatcacctatcggtcgtggtcagcgtggtctgattgtggcaccgccgaaagccggtaaaaccatgctgctgcagaacattgctcagagcattgcttacaaccacccggattgtgtgctgatggttctgctgatcgacgaacgtccggaagaagtaaccgagatgcagcgtctggtaaaaggtgaagttgttgcttctacctttgacgaacccgcatctcgccacgttcaggttgcggaaatggtgatcgagaaggcgaaacgcctggttgagcacaagaaagacgttatcattctgctcgactccatcactcgtctggcgcgcgcttacaacaccgttgttccggcgtcaggtaaagtgttgaccggtggtgtggacgccaacgccctgcatcgtccgaaacgcttcttcggtgcggcgcgtaacgtggaagagggcggcagcctgaccattatcgcgacggcgcttatcgataccggttctaaaatggacgaagttatctacgaagagtttaaaggtacaggcaacatggaactgcacctctctcgtaagatcgctgaaaaacgcgtcttcccggctatcgactacaaccgttccggtacccgtaaagaagagctgctcacgactcaggaagaactgcagaaaatgtggatcctgcgcaaaatcattcacccgatgggcgaaatcgatgcaatggaattcctcattaataaactggcaatgaccaagaccaatgacgatttcttcgaaatgatgaaacgctcataaatttgtcttatgccaaaaacgccacgtgtttacgtggcgttttgcttttatatctgtaatcttaatgctgcgctggcgatgttaggaaaattcctggaatttgctggtgtgttatgcaatttgcatatcaagtagttaattttcgcatagtgctggtaggttcggaacggactttcctttctgaataaaggtcttcgtggttatacttctgctaataattttctctgagagcatgcattgtgaatttactgacagtgagtactgatctcatcagtatttttttattcacgacactgtttctgttttttgcccgtaaggtggcaaaaaaagtcggtttagtggataaaccaaacttccgcaaacgtcaccagggattgatacctctcgttggggggatttcggtttacgcagggatttgcttcacgttcggaattgtcgattactatattccgcatgcatctctctatctcgcttgtgctggtgtgcttgttttcattggcgcgctggatgaccgttttgatatcagcgtaaaaatccgtgccaccatacaggccgctgttggcattgttatgatggtgttcggcaaactttatctcagtagcctgggttatatctttggctcctgggagatggtgctcggaccgtttggttacttcctgacgctatttgccgtctgggcggccattaatgcgttcaacatggttgatggcattgatggcttgctgggcgggttgtcctgcgtctcgtttgcagcaatcggtatgattttgtggttcgacgggcaaaccagtctcgcaatctggtgctttgcgatgatcgccgccatcctgccatacatcatgcttaaccttggtatcctgggtcgccgctacaaagtctttatgggggatgcgggcagtacgctgattggttttaccgttatctggatcctgctcgaaacgacccagggcaaaactcatcccatcagcccggttaccgctttgtggataatcgccattccgctaatggatatggtggcgattatgtaccgtcgcctgcgtaaaggcatgagcccattctctccagaccgtcagcatattcaccatttgatcatgcgtgccgggtttacttcccgccaggcgtttgtgctgattacccttgccgcagcactgctcgcttccattggcgtgctggcagaatattctcattttgtcccggagtgggtcatgctggtgctctttttgctagcattcttcctctatggatattgcatcaagcgtgcctggaaagttgctcgctttattaagcgcgtaaaacgcagactgcgtagaaatcgtggtggcagccccaatttaaccaaataaatgaggatgtgatgacacaaccaatgcctgggaaaccggccgaagacgctgaaaatgaactggatattcgtgggttgtttcgtaccttgtgggctgggaagctgtggattattggcatggggctggcgtttgcgttaatcgcgctggcgtatactttttttgctcgccaggagtggagctcgacagcgattaccgatcgtccaacggtgaatatgctggggggatattactcacagcagcaatttttgcgtaacctggatgtccgttcaaacatggcttctgccgaccaaccatcggtcatggacgaagcctataaagagtttgttatgcaactggcctcgtgggatacccgcagagagttctggctgcaaaccgactattacaaacagcggatggtgggcaatagcaaagccgatgcggcgttgctggatgaaatgatcaacaacatcgtgtttattcccggtgacttcacccgcgcggtcaatgacagcgtgaagctgattgccgaaactgcgcctgacgctaataacctgttacgtcagtatgttgcttttgccagccagcgtgcagccagccatctgaatgatgagctgaaaggcgcatgggcggcacgcaccatccagatgaaagctcaggtgaagcgtcaggaagaggtggcgaaagctatctacgatcgccggatgaacagtattgaacaggcgctgaaaattgctgagcagcataatatttcgcgcagtgcgacagatgtgcctgccgaggaattacctgattcagaaatgttcctgcttgggcgtccaatgctccaggctcgactggaaaatttacaggccgtcggtccggcctttgatctcgactatgatcaaaatcgggccatgttaaacaccctgaatgttggtccaaccctggatccgcgttttcagacctatcgctatttgcgtacgccggaagaaccggtaaaacgcgatagcccacgtcgtgccttcctgatgattatgtggggcattgtcggggggctgatcggggctggtgtcgcattaacccgccgttgctcgaaatagcaacactgctgcggtgagcgcaaaggcgctcgccgcttattcgaagagaatcgatgtgaaagtactgactgtatttggtacgcgcccggaagccatcaagatggcaccgttggtgcatgcgttggcaaaagatcctttttttgaggctaaagtttgcgtcactgcgcagcatcgggagatgctcgatcaggtgctgaaactcttttccattgtacctgactacgatctcaacataatgcagccaggacagggccttacagagataacctgtcggattctggaagggctaaaaccaattcttgccgagttcaaaccagacgtcgtgctggttcacggtgatactactacaacgctggcaaccagcctggcggcgttttatcagcgtattcctgttggtcacgttgaggctggtctgcgcacgggcgatctctattcgccgtggccggaagaggctaaccgtacattgaccgggcatctggcgatgtatcacttctctccaaccgaaacttcccggcaaaacttgctgcgtgaaaacgttgctgacagccgaatcttcattaccggtaataccgttattgatgcactgttatgggtgcgtgaccaggtgatgagcagcgatacgctgcgttcagaactggcggcaaattatccgtttatcgaccctgataaaaaaatgattctggtgaccggtcacaggcgtgagagctttggtcgtggttttgaagaaatctgccatgcactggcagacatcgccaccacgcaccaggacatccagattgtctatccggtgcatctcaacccgaacgtcagagagccggtcaatcgcattctggggcacgtgaaaaatgtcattctgatcgatccccaggagtatttaccgtttgtctggctgatgaaccacgcctggctgattttgaccgactcaggcggcattcaggaagaagcgccttcgctggggaaaccggtgctggtaatgcgcgataccactgagcgtccggaagcggtgacggcgggtacggtgcgtctggtaggcacggataagcagcgaattgtcgaggaagtgacgcgtcttttaaaagacgaaaacgaatatcaagctatgagccgcgcccataacccgtatggtgatggtcaggcatgctctcgcattctggaagcgttaaaaaataatcggatatcactatgagttttgcgaccatttctgttatcggactgggttacatcgggctgcctacagcagctgcgtttgcctcaaggcaaaaacaggtgattggtgtcgatatcaaccaacacgcggttgataccatcaatcgtggcgaaatccatatcgtcgagcctgatttggcgagcgtagtaaaaactgccgtagaaggcggttttttacgagcgagcacgacgccggttgaagcggatgcctggctgattgctgtacccacgccgtttaaaggcgatcatgagccagatatgacctacgttgaatcggctgctcgctccattgcgccagtgctgaaaaaaggcgcgttggtgatccttgaatccacctcgccggtggggtcaaccgagaagatggcagaatggttagcagagatgcgtccagatctcactttcccacagcaggtgggcgagttggcggacgtcaacattgcttactgcccggaacgcgtattaccgggccaggttatggtcgagctgattaaaaacgatcgcgtgattggtggtatgacgccggtttgttcggcccgcgccagcgaactgtacaaaattttcctcgaaggtgagtgtgtcgtaactaactcgcggacggcggaaatgtgtaagctcaccgaaaacagctttcgcgatgtgaatatcgcttttgctaatgaattgtcgctgatttgtgccgatcaggggattaacgtctgggaactgattcgcctggcgaatcgtcaccctcgcgtcaatattcttcagccaggccctggcgtgggcggtcactgcatcgctgttgatccgtggtttatcgtggcacagaacccccagcaggcgcggcttatccgtaccgcgcgcgaagtgaacgatcacaaaccgttctgggttatcgatcaggtgaaagcggcggtggctgattgtctggctgctaccgataaacgcgccagtgaactgaaaatcgcctgctttggtctggcgtttaaaccgaatattgatgacctgcgtgaaagccctgcgatggaaatcgctgaactgatcgcccagtggcacagcggcgaaacgctggttgttgagcctaacatccacgagttgccgaagaaactgaccgggctttgtactctggcgcagcttgacgaggcgctggcaacggcagatgtgctggtgatgctggtcgatcatagtcagttcaaagttatcaatggcgacaacgtccatcagcagtatgtcgtcgatgccaaaggagtctggcgctgatgagaaagattctgataacaggtggtgccgggtttattggctcggcgctggtgcgttatatcatcaacgaaacgagcgacgcggtggtggtggtcgataagctgacctacgccggaaacctgatgtcgctggcaccggtcgcgcaaagcgagcgctttgcctttgagaaagttgatatctgcgatcgggcagaactggcgcgcgtattcactgagtatcagccagactgtgtcatgcatctggcagccgaaagccatgttgaccgttctattgacggcccggcagcgtttattgaaaccaacattgtcgggacttatacactgcttgaagcggcgcgggcttactggactgcgctgacggaagataaaaaatcagcgttccgttttcatcatatctccaccgacgaagtatatggtgacctgcactcgacggatgatttcttcaccgaaaccacgccgtatgcgccgagcagcccttattccgcgtcaaaagccagcagcgaccatctggtgcgcgcctggctgcggacctatggtttgccgacgcttatcaccaactgctcgaataactacggtccttaccactttccggaaaaactgatcccgctgatgatcctcaacgcgctggcgggtaaaccgctgccggtatatggcaacgggcagcaaatccgtgactggctgtatgttgaagatcatgcccgcgcgctgtattgcgtggcgaccaccgggaaagtcggtgaaacctataatattggcggtcacaacgagcgtaagaatctcgaggttgtggaaaccatctgcgagctgctggaagaactggctccgaacaagccgcacggcgtggcgcactatcgcgatctgatcacctttgtcgctgaccgtccagggcatgacctacgctatgccattgatgcttcgaaaattgcccgtgaacttggctggctgccgcaggaaacctttgaaagtggaatgcgtaaaacggttcagtggtatctggctaatgaaagctggtggaagcaggtgcaggacggcagctatcagggcgagcgtttaggtctgaacggctaattctcagcggaggcaaacatgaaaggtattatcctggcgggcggttccggcacccgattgcatccgattacgcgcggcgtatcgaagcaactgttgccgatttacgataagccaatgatttactatccgctgtcggtgctgatgctggccggtatccgcgaaattctcatcatcactacgccggaagacaaaggttatttccagcgcctgctgggcgatggtagtgagttcggtatccagctggaatatgccgaacagcccagcccggacggtcttgcgcaggcatttatcatcggtgaaaccttccttaatggtgagccatcttgtctggtgctgggcgataacatcttcttcggtcagggcttcagtccgaagctgcgtcatgttgcggcgcgcacgcaaggggcgacggtatttggctatcaggtaatggatccagaacgctttggcgtcgtggagtttgacgacaatttccgcgctatctctctggaagaaaagccaaaacagtcaaaatcaaactgggcggtgaccgggctttatttctacgacagtaaagttgtggagtacgcaaagcaggtgaagccgtcggagcgtggtgaactggagattacctccatcaaccagatgtacctcgaggcgggcaacctgaccgttgaactgctcgggcgcggatttgcctggctggacactggcactcacgacagcctgattgaagccagcacctttgtacagacggtggaaaaacgccagggctttaagattgcctgcctggaagagatcgcctggcgtaacggctggcttgatgacgaaggcgtgaagcgcgccgccagctcgctggcgaaaactggctacggccaatatctgctggagttacttcgtgcccgtccgcgccagtattgagccactaacctgggaaaacgccttctttggtgttaacagtgccattgtgcgcattacgtctgaagcaccgctcctgacgccagacgcgttagcgccgtggtcacgggtgcaggccaaaattgcggcatcaaatacgggtgaactggatgccctgcaacagctgggattctccctggtagaaggtgaagttgatttggcgctacccgtgaacaatgtcagtgatagcggtgctgtagtggcacaagagaccgatattcccgcattacgtcagttagccagcgccgcatttgcgcaaagccgttttcgtgcgccatggtatgcgcctgacgccagcggtcgcttttatgcgcagtggattgaaaatgccgtgcgcggcacctttgatcatcaatgtctgattttacgtgcggcgtccggcgatattcgcggctatgtctctttacgggaactcaatgcgacagatgcgcgaattggcctgctggctggacgcggtgcaggtgctgagctgatgcaaacagcgctaaactgggcgtatgctcgcggtaaaacaactttgcgggtggcgacccagatgggcaacaccgccgcgcttaaacgatacatacaaagtggtgcgaatgtagaaagcaccgcgtactggttatacaggtgatcacatgattccatttaacgcaccgccggtggtgggaaccgaactcgactatatgcagtcggcaatgggtagcggcaaactgtgcggcgatggtggttttacccgtcgctgccagcagtggctggagcaacgttttggcagcgccaaagtgttactgacgccatcctgtaccgcttcgctggagatggcggcgctgctgctcgatatccagcctggcgatgaagtgatcatgccgagctacacctttgtctccaccgccaatgcctttgtgctgcgtggcgcgaaaatcgtctttgtggatgttcgcccggacaccatgaacatcgacgaaacgctgattgaagcggcgatcaccgacaaaacgcgcgttatcgtgccggtccattacgcgggtgtggcctgcgaaatggacaccattatggcgttggcgaagaagcataatctgtttgtggtggaagatgccgctcagggcgtgatgtccacttacaaagggcgtgcgctgggaaccattggtcatattggctgctttagcttccatgaaaccaaaaactacacggcgggtggtgaaggcggcgcgacgctgattaacgataaagcgttgatcgaacgagccgagatcatccgtgaaaaaggcacaaaccgcagccagttcttccgtggtcaggtcgataaatatacctggcgcgatattggctccagctatttgatgtccgatctgcaagctgcgtacctgtgggcgcaactggaagctgcggatcgtatcaaccagcaacgtctggcgctgtggcaaaactactacgatgcgctggcgcctctggcaaaaaatgggcgtatcgagctgccgtcgattcccgatggctgcgtgcagaacgcgcatatgttctacattaaactgcgggatattgctgaccggagcgcattgattaactttctgaaagaagcggaaatcatggcggtgttccattacattccgctgcacggttgccctgcgggggaacgctttggtgagttccacggcgaagatcgctacaccaccaaagagagcgagcgcctgctgcgcctgccgttgttctacaacctgtcgcccgtcaatcagcgtacggtaattgcgaccttgttgaactacttctcctgatatgtcgttggcaaaagcgtccttgtggacggcggccagtacactggtcaagattggtgccgggttactggtcggtaagttgctggcagtgtcatttggtccggcggggcttgggctggcggcaaatttccgccagttgattaccgtgctcggcgtgcttgccggggcaggcatctttaacggcgtaaccaaatacgttgcccagtatcatgataatccccaacagctgcgccgcgtagtcggcacttcatcagcgatggtacttggcttctctacgctaatggcgctggtttttgtgctggcagctgcgccaatcagccaggggttgtttggtaataccgactatcaggggctggtgcgtttagtggcgctggtgcaaatggggattgcctggggcaacctgttactggcgttgatgaaaggctttcgcgatgccgcaggtaatgcgttatctctgattgtcggtagcttgattggcgttctcgcgtactacgtcagttatcgtttgggcggttatgaaggggcgttgctgggtctggcgctgattcccgcgctggtggtaattcctgctgttatcatgttgatcaaacgtggtgtcatcccgttaagctatctgaaacccagctgggataacggtctggcagggcagttgagcaaatttacgctcatggcgttgattacgtcggtgaccttgcctgttgcttacatcatgatgcgtaaactgctggcggcgcagtatagctgggatgaagtggggatctggcaaggggtgagcagtatttccgatgcctacctgcaatttattacggcatcgttcagcgtatatttgctgcccacgttgtcgcggttaacggaaaagcgcgatatcacccgggaagtggttaaatcgctgaaatttgtcttaccggcagtggcggcggcgagttttaccgtctggttgctgcgtgattttgctatctggctgctgttgtcgaataaatttaccgctatgcgcgatctctttgcctggcagttggtgggtgatgtgttaaaagtgggcgcttatgtctttggttatctggtgatcgccaaagcgtcactgcggttttatattctggcggaaatcagccagttcactttattgatggtatttgccaactggctaatccctgcgcatggcgcactgggcgcagcacaggcctatatggcaacctatatcgtctatttttctctttgttgtggcgtgtttttactctggcgtaggcgggcatgactgtactgattcacgtactgggatcggatatccctcaccataaccgaaccgttctgcggtttttcaacgacgcgctggccgcgacgagcgagcacgcgcgcgagtttatggttgctggcaaggacgacggcttaagtgatagctgtctggcgctttctgtgcaatttttccctgggaaaaaatcgctggcggaagcggtcatcgcgaaagcaaaagctaaccgtcagcagcgattttttttccacggtcagttcaatcccaaactgtggctggctctgctgagtggtggcattaagcccagccagtttttctggcatatctggggagcagacctgtatgagctttccagtggcttgagatataagcttttttacccgctacgtcgcctggcgcaaaagagagtcggctgtgtatttgccacccgcggtgatttgagcttttttgccaaaacgcatccaaaggtgcggggagaactgctgtacttcccgacgcggatggacccttctcttaatacgatggcgaacgatcggcaacgtgaaggaaaaatgaccattctggtggggaactccggtgaccgcagcaatgagcatattgctgccttgcgcgccgttcatcagcaatttggcgatacggtaaaagtggtggtgccgatgggatatccgcctaataacgaagcgtacatcgaggaagttcgtcaggcgggactggagttattcagcgaagaaaacctacaagttctgagcgaaaaactggaatttgacgcctatctgacgctacttcgccagtgcgatctcggttactttatttttgcccgccagcagggcattggtacgctttgcttactgattcaggcgggcattccttgtgtgcttaaccgggaaaatccgttctggcaggatatgacggaacagcatttgccagtactgtttactaccgatgatctcaacgaggatattgtgcgtgaagcgcagcgccagttggcgtcggtggataaaaacaccattgccttctttagccctaactatctacaaggctggcagcgggcgttggcgattgccgccggggaggtcgcatgagtctgctgcaattcagtggcctgtttgttgtctggctgctctgcacgctgtttattgccacgctgacctggtttgagtttcgccgtgtgcgctttaacttcaatgtcttcttttcattgctgtttttgctcacctttttcttcggctttccgctgaccagcgtgctggtatttcgctttgatgttggtgtcgcgccgccagaaatcttgttgcaggcgttgctttctgcaggctgcttctacgcggtttactatgtcacctacaaaacccgtctacgcaaacgcgttgctgatgcaccgcgccgtccgctgtttaccatgaaccgcgtggagaccaatctcacgtgggtgatcctgatgggcatcgctctggtgagcgtcggcatcttcttcatgcacaacggctttttgctgttccggcttaattcttacagtcagatcttttccagcgaagtctccggcgtggcattaaaacgcttcttttactttttcatcccggcgatgctggtggtttattttctgcgccaggatagcaaagcgtggctgtttttcctcgtcagcacggttgcctttggcttgttgacttacatgattgtcggcggcactcgcgccaatatcatcatcgcattcgctatcttcctgtttattggcattattcgcggctggatttctttgtggatgctggcggcggcgggcgtgctggggattgtgggcatgttctggctggcgctaaaacgctatggaatgaatgtgagcggcgatgaagcgttctatacgtttctctatctcactcgcgacaccttctcgccgtgggagaatctggcgttgctgttgcagaactacgacaacatcgacttccagggcctggctccaattgtccgcgatttctatgtctttatcccttcctggctgtggccgggtcgcccgagtatggtgctgaactccgccaactactttacctgggaagtactgaataaccactccggactggcgatctcgcctacgcttataggctcactggttgttatgggcggcgcgttgttcatcccgctcggggcgattgttgttggactgatcatcaaatggttcgactggctgtatgagctgggcaaccgcgagactaatcgctataaggctgcgatattgcacagtttctgcttcggggcgatcttcaatatgatcgtgctggcgcgtgaagggctggattcgtttgtctcacgcgtggtcttttttatcgtggtcttcggcgcatgtctgatgatcgcaaaactgttgtactggctttttgaaagcgccggactcattcataaacgaacaaaatcatcgctccggacgcaggttgaaggataacaatgaataacaacaccacggcaccgacctatacgctgcgtggcttacagttgattggttggcgtgatatgcagcatgccctcgattatctgttcgctgacgggcagcttaagcagggaacgctggttgccattaatgccgaaaaaatgctgaccattgaagataacgccgaggtcagggagttaattaacgctgccgaatttaaatatgcggatggcatcagcgttgtacgttcagtacgtaaaaagtacccgcaggcgcaggtttcccgcgttgctggggccgatctctgggaagagctgatggcgcgcgcaggcaaagaagggacaccggtatttcttgtgggcggtaaacctgaagtgctggcgcaaactgaagctaaactgcgcaaccagtggaatgtgaatatcgttggcagtcaggatggttattttaaacccgagcagcgtcaggcgctgtttgaacgcattcatgccagcggagcgcaaatcgtcaccgttgcgatgggatcgccaaagcaggagatcttcatgcgcgactgccgtctggtgcatccagatgcgctgtatatgggcgttggcgggacctacgatgttttcaccggtcacgtaaaacgcgcaccgaaaatctggcaaacgctggggctggagtggctctaccgcctgctttcgcagccgagccgcattaagcgtcagcttcgtttgctgcgttatttacgctggcattacaccggcaacctctgattttcctctctttgtaaagcgacgaagtggtcacttcgtcgcctgtctgcttttttattacacaaagcattcaaatttttaatgctttatttgccatttctcctgaattacgaaaacattcgcaacactcgatgtacccataacgataaccggtaacaccggaaagcatgcaaacacaacacgaggatttatggcagataacaaaccagagctacagcgtgggctggaagctcgacatatcgaactcatcgccctggggggcaccattggcgtcggcctgtttatgggggccgccagtaccctgaaatgggccgggccatccgtattgttggcctatatcatcgccgggctgttcgtctttttcatcatgcgttcaatgggcgaaatgttgttcctcgaaccggttaccggttcgttcgccgtttacgcgcatcgttatatgagcccattctttggttatctcaccgcctggtcttactggtttatgtggatggcggtggggatctcagaaatcaccgccattggcgtttatgtccagttctggttcccggagatggcgcagtggatacccgcattgatcgcggtggcgctggtggcgttggcgaatctggctgcggtgaggttgtacggcgaaatcgagttctggttcgcgatgatcaaagtcaccacgattatcgtgatgattgtcattggcctgggcgtgattttctttggctttggcaatggcgggcagtcgattggttttagcaatctcacagagcatggcggtttctttgctggtggctggaaagggttcctgaccgcattgtgtattgtggtggcgtcctaccagggcgtggagctgattggcattactgccggtgaagcgaagaatccgcaggtgacgctgcgcagtgccgtaggcaaggtgctgtggcgaatcctgattttctacgttggcgcgattttcgttatcgttactatcttcccgtggaatgaaataggcagcaacggtagcccgttcgtactgactttcgccaaaatcggcattaccgcagcggcgggcattatcaactttgtggtgctgacggctgcgctctctggctgtaacagcggcatgtacagttgcggacgtatgctctatgcactggcgaaaaaccgtcagttaccggcggcaatggcgaaagtttcccgtcacggcgtaccggttgcgggtgtggcagtatctattgctattctgctaattggctcatgcctgaactacatcattcccaatccgcagcgtgtgtttgtttacgtctacagtgccagcgtgcttccggggatggtgccatggtttgtgatattgataagccagctgcgttttcgtcgtgcgcataaagcagcaattgccagccatccgttccgctcaatcctgttcccttgggccaactacgtaacaatggcattcctgatttgcgttttgatcggcatgtactttaatgaagatacgcgtatgtcgctgtttgtcggcatcatctttatgctggtggtgacggcgatttataaagtttttgggcttaatcgccacggtaaagcgcataaactggaggaataagcagcaaaacgcacaaaccgtaaccaaacgcgcaatttatttaaaaagggactagacagaggggtgggaagtccgtattatccacccccgcaacggcgctaagcgcccgtagctcagctggatagagcgctgccctccggaggcagaggtctcaggttcgaatcctgtcgggcgcgccatttagtcccggcgcttgagctgcggtggtagtaataccgcgtaacaagatttgtagtggtggctatagctcagttggtagagccctggattgtgattccagttgtcgtgggttcgaatcccattagccaccccattattagaagtggtgacaatgcgaaggtggcggaattggtagacgcgctagcttcaggtgttagtgtccttacggacgtgggggttcaagtcccccccctcgcaccacgactttaaagaattgaactaaaaattcaaaaagcagtatttcggcgagtagcgcagcttggtagcgcaactggtttgggaccagtgggtcggaggttcgaatcctctctcgccgaccaattttgaaccccgcttcggcggggttttttgttttctgtgcatttcgtcactttcccttcgcaataaacgcccgtaataacgcattgcgccacggtatgatttcgcccttaacttattgaaggatgacttcaggcaaggagcgaccatgcagcaacaggttccaacgcgtgcttttcatgtgatggcgaaaccgagcggttctgattgtaatctgaactgtgactactgtttttatctcgaaaaacaatccctttaccgcgaaaagccagtcacgcatatggacgatgacacgctggaagcgtatgtccgtcactatatcgctgccagcgaaacccaaaacgaagtggcttttacctggcagggcggcgaaccaacgttactcgggctggatttttaccgccgtgccgtggcgctacaggcgaaatatggtgctggcaggaagataagtaatagcttccagactaacggcgtgctgctcgatgacgaatggtgtgcatttctggcagaaaatcattttcttgtagggttatcgctggatggtccggctgagatccacaatcaatatcgcgtgaccaaaggtggcagaccaacgcataagctggtgatgcgtgctctgacgctcctgcaaaaacatcatgtcgactataacgtgctggtctgcgtcaatcgcaccagtgcgttacaacctttgcaagtctatgattttctgtgtgatgcaggtgttgagttcatccagtttattccggtggtcgagcgcctggctgatgaaacggctgctcatgctggacttaagctacatgctcccggcgatattcagggcgaactgacggaatggtcggtgtgcccgcaagagttcggtgagtttctggtggcgattttcgaccactggattaagcgcgacgtcggcaagattttcgtaatgaatatcgaatgggcgttcgccaattttgtcggcgcaccgggcgcggtttgccatcatcagccaacctgtgggcgctcggtgattgttgaacacaacggcgatgtttacgcctgcgatcactatgtttatccgcagtatcgactagggaatatgcttcagcagacgattgcagaaatgattgattccccgcaacagcaggcatttggtgaagataaattcaagcagttaccggcacagtgtcgcagttgcaacgtgttaaaagcgtgctggggaggctgcccgaaacaccgctttatgctcgatgccagcggcaaacccgggctgaattatttgtgtgccgggtatcagcgttatttccgccatctaccgccatatcttaaagcaatggctgatttgctggcgcacggtcgtccggccagcgacattatgcaggcgcatttgatggtggtgaataagtagaaatcggcggccgcctgcggttgattgccggatgcggcgtgaacgccttatccggcctacaatcattgcaaattcaataaattgcagcgttctgtaggctggataagatgcgtcagcatcgcatccggcaaaggcagatctcagcgatagcgccggcttaatcagatttaatctgcgcgcgtggtggatattttttcaggatctccatatacgcatgcatttcggtctgtagcggtacacccattgggatatggcgcacgccgatagagtcgctttcctgcggatcggtgtacaggttaaacaccgacgatcccgccgtttgcattactgtgccggtgaatccaccctgatatccgctctgggtataagcgtaaggttgctgaatcaggacgtgatacttgaactcatccatacgcacagcagaaagtttaccgttgaggaagtagtgctcggccttacggttagactgaccatttgttcccaggaagaaagatgtctggtccacaccatcgataaaggtggttttcggtactaaattcgctactttcgccccaggatgccccgccagatccagcgccgtagggaagagatccgccagatcgacaatgccgtcagatttacgcggttggatcatgcctttccagtaaacgaaggttggcacacgaacgccgccttcccatgtagaacctttcgcaccgcggaacggcgtgcgaccgtgcggcggaacttcggcttccggaccgttatcagaggtgaacacaatcagcgtgttatcaagctgaccgtttttctccagtgctttatacagattggcgaagatatcgttcatctccaccatgcagtcgccgtaagaggtgcgcgccggagagctacccgcatatttggcgttcgggtagttatcgaagtgacagccgcgagtgccgtaatagaggaagaaaggcttatcactcttcgccatcttgtcgaggaacttaacgccatattccatccagcgttgatccaggtcttccatatatttcggcgtaatgtcggcaatggcttcctgttcaccgccgcgcacggcatgaacgtcatctttgctgaacggcagtttttggatgtattcagaacgagccgggctcagggcgacttccgggttgacatgaacatcacgccattcggtatacatatcggacaccgagttaaagccgcggaaatcatcaaagccaacgttctgcggctgcgactctttgttttcccccatatgccatttcccgatagcctgggtgacgtagccctgatcgtgcagcaactgcggcagcgtggttaacccttgcagaccgcccggttgcccgtacattggcggcatcagaatgccgtggtggatggagtattgtccggtgagaatcgtggcgcgggttggggaagaactcggttgagaatacgccgaagttaaaatcagcccctggctggcaacggcgtcgatatctggtgtagggttacccaccgccacgccgccgccgttaaagccaacgtccatccagcccacatcatccagcaagaaaacaaccacgttcggtttcttaccggtttttttctcaagttccgccagtttctgctgggtttctttgtcttgtgcaggatgctgcatcaccggcatcatgttgtcggcaatagtggtcgccggtttaaccagatactggtttgggtgatcgtatccggcaaagcctttgcgtgcggtggcggttgacggggtatctgctgcgctggctatgagaggaagagctgcggcgacagcaacaacaagaagtttgggtgaaaacgaaaattccatgcaaaatgctccggtttcatgtcgtcaaaatgatgacgtaattaagcattgataattgagatccctctccctgacaggatgattgcataaataatagtgataaaaataaattatttatttatccagaaaatgaattgaaaaatcaggagagcattttcaatcctacctctggcgcaggtgatatgtaaggcggtgatgttatatcgcgttgattattgatgctgtttttagttttaacggcaattaatatatatgttattaattgaatgacttttattattcattatatatatgtgtagaattgtgcgcaggagaaatattcactcaggaagttattactcaggaagcaaagaggattacagaattatctcataacaagtgttaaggggatgttatttcccggttctctgtggcataataaacgagtagatgctcattccatctcttatgttcgccttagtgcctcataaactccggaatgacgcagagccgtttacggtgcttatcgtccactgacagatgtcgcttatgcctcatcagacaccatggacacaacgttgagtgaagcacccacttgttgtcatacagacctgttttaacgcctgctccgtaataagagcaggcgtttttttatatatcagaaaggccccggaggtgcttgcctccgggtgagaaagagctactgtggcgggttgttctgcaacgttaacatcaaaccgtcgcgacgcatcgctgcggcttcttccggcttgtgcagtctgtccagcgcgtcggcaagccatgcgtaatcgtaggcgtccggacgttgtttcagcgctgcgcggaaggcgagcgatgcttcctgccattctccgtgtttcatcagcgactgacccagtgtgctccacaacagcgggcgatcgcccacgtttttgatctgttggcgcagcactttttccagctgttccgggttattggttttcagacgcgggatcggcagcagcaggcgatcgtcatactggcgtttcaggccatcgatgataatttgctgggcagtatcatgatcgtcacactcaataagatgttccgccattgccacctgcaaggccacctgatgacgcgttttccggctttggtttttccaccagttacgcaaaccttcactaccgttatcggcacgcgcctgatccatcaggccaatccatgcctgttgttccagcattgcacgatgttcttcatcaccaacatgggctttcgccattgatgggatgatatccagcagcgaactccatgcaccagtgcggatatacgcctgttccgccagacgtaatacttccggatggcgtggcgtaacttccagcagcttatccacgccgtgacgtgctgcatggttttcattacgggccagttgcagacgtacacgggtgatttctaccggaatggtgtcattgccggccagctccgctgcgcgttccagatgttggttggcgcgtgcttcatcaccacgttgttgcgcggcttcggctgccagtagatagttcaccaccggttgttcagcgtgatcggcatttttcgccatcagcttttcaacttgctgataatcgccttccgccagtttcagcagcgcctgttcggtctgcttacgtgcacggcgacgcttacgtccgacaaaccacccacgggtgtgcgcgcctgtgcggaagattcgccgcagtagccactcaatggcaaacagcactaccatcgccagaatcaaaataatcgcgaggcccgtgacgctggtttcaatattgtagttgtcggtctggatcagcacgtaaccctgatggccggcaatcatcgggccaaccacgatccccgcaatcagcaacacaaagagcaataacacttttagcatggttattctccttgcggcgcggctgccggagcatcagcttgcggtgcaggtgcaggtgcaggtgcaggtgcaggtgcaggtgcaggtgcaggtttagcttccgttgtccctgctgccggttgtgccagcaggttacgcacgcgggtctgcatcaatttttccagcatcgcctggctttgcagggtttccggaagatccatcgagatattttgctggcttaactggtccacctcgtcgaggaacgctttggtggtggcatcatcagtatcgtagtaagcacgtacccaggtggagacgttctccagcgcctggcgataagtctcttcctggtgacgcggtacagcttgtgctgcgaccagcaggcgagagcgaatattttcgcgcagatagatatcctgatttggcgctaacagcggtacggcggtgtcatcacgacggcgaatcgtaatgaagttgtccataaagttctgccagcttttttgcagattgatacgccattcgctgatggaactggaaagctcttcaccgtcggaatccatcggcgaaccatcgctgtcattatcggccagacgcagattatctacctgatttgaaagctgattaagcttaaggatgataccgtcataatccacctgcgataccgcagaaaggctggcgatatcatcggtaattgcccggcgaacggtaatcagactcgggtcattcatatccgccaggctggcgtctgcacttttcagcaacgctgcagcggtcgtgacgtcctgatcgctccacagcttccgtccggcgagtttcaccagaaaatcggcctgggccagcagccaggttttagcatcgctgccggaaatggtggcgaccttttgttggacttcatccagctgttttgccagcgtttcttgctgacgattcgcctgctcaagctgtacagcttgttgcttgataatgccttccagctcggctttttggctctcctgggctttttgcagtgccgtaagttggttagccagggcatcgctggtggcagtctgattgacggcctgttgtttaccccagccatacaaaccgacgcccgccgccagagcaatagcgatagccaccgcgctgagaatcaatgcggtattgttcttactctttttttctgttgcgacaggttgtgacgtggtgtccacggcctccctggtctcttcaaccacggcggaggttttttcttgttccgtcattatggcttcctgttatgagagttattgtaatgcccgtaaaagcgcatcgttgtcagcgttatcggcgaccttaatgtcttgccagcccagttcccgggcgagtttcgccaaacgctcactgacgaccaatagtcgacagcgtagtaaccagtgctcacgataccattgtgggatcagcgaccagagttgctgcaacatttcaccgctggtaacaacgaccgtcgtcacctcgcgggattgccagcgcatcgcttcttctgcaccatcgtaatggattgcgcatcgttgataacattcacaaaaagtgacctcagcaccgcgcgccgtcagggaatccccaattagctcacgaccgccattgccacgtaatatcagcgcacgtttgcccgcaatattttgtaattcaggtaattgtagcaagacttcgctgatttcccgatcctgcgggtagagaatcttctgtccgcttacggtatgtagtgccagcgcggtggtgcgtccaatggcgaaataatcaggtagtcggggccatttacgatcttgctgatgcagctgtgattgggcaaaagcaaccgcgtgttgcgagagggcaaacaacagatcgctctctcccagcgctgccagttgatcagcaagttgcggtaattgtcgacccggagaaaactcaatcagcggaaaatgccatgccacctgccccagtgtgcgcagacggctcactaactcttctcctgcgggaaacgggcgggtgaccaggatactcatgccggggcgtctccgttatagacttcagcgaggatctcgcgcgcgccgttattcagtagctcttctgccagcgaaatccccatttgttcggcatcttgcggcgcaccgcggcgttcaccgcgaataatctgcgaaccgtccggcgcgccaaccaacgcacgcagccagatttcgccatcaataagctcggcgtagctaccaattggcacctgacatccgccttcgagacgggtattcatggcgcgttcggcggtaacgcgcagtgcagtttcgtggtgattcagcgcggcgagcagctcgcgagtgcgtgcatcatcaaggcggcattcaatgcccaccgcaccttgccctaccgccggaagagaaatctcgggtggcaacgcggcgcgaatgcgggactccagacctaaacgttttagtccggctacggcaagaatgatggcatcatattcgccgttatccagtttgctcagacgagtgccgacgttgccgcgcagggagcggataatcagatccgggcggcgttcagccagttggcactggcgacgtaaactggacgtcccgacgatactgcctgccggtaacgcatccagactgtcataggtgttggatacaaaggcatcgcggggatcttcgcgctcgcaaatggtgaccagccccagaccttgcgggaattcaacgggcacatctttcattgaatgaacggcaatatcggcgcgattttccaggagcgcgacttccagctctttcacaaataagcctttcccgcctactttcgccagcggcgtatcaagaatcacatcgccgcgcgtcaccatcggtaccagttcaacgaccaggcccggatggctcgccatcaacttgtctttgacatagtgtgcctgccagagtgcaagtgggctttggcgtgtggcaattcttaaaacattgtctaacatgcttgttaccgtcattatcatccgtggtccatcctaacatccttgccagagcgatgtcagtgttgtggtgaaacgtagacgcctgcgcaaaccgtaaaatgaggtctggcagtggatcctgacaggcgctttgagccttcgtaataaggaatttacagagaataaacggtgctacacttgtatgtagcgcatctttctttacggtcaatcagcaaggtgttaaattgatcacgttttagaccattttttcgtcgtgaaactaaaaaaaccaggcgcgaaaagtggtaacggttacctttgacatacgaaatatcccgaatgccgcgtgttaccgttgatgttggcggaatcacagtcatgacgggtagcaaatcaggcgatacgtcttgtacctctatattgagactctgaaacagagactggatgccataaatcaattgcgtgtggatcgcgcgcttgctgctatggggcctgcattccaacaggtctacagtctactgccgacattgttgcactatcaccatccgctaatgccgggttaccttgatggtaacgttcccaaaggcatttgcctttacacgcctgatgaaactcaacgccactacctgaacgagcttgaactgtatcgtggaatgtcagtacaggacccaccgaaaggtgagcttccaattactggtgtatacaccatgggcagcacctcgtccgtagggcaaagttgttcctctgacctggatatctgggtctgtcatcaatcctggctcgatagcgaagagcgccagttgctacaacgtaaatgtagtctgctggaaagctgggccgcctcgctgggtgtggaagtcagcttcttcctgattgatgaaaaccgcttccgtcataatgaaagcggcagcctggggggcgaagattgtggctccacccagcatatactgctgcttgacgaattttatcgtaccgccgtgcgtctcgccggtaagcgtattctgtggaatatggtgccgtgcgacgaagaagagcattacgacgactatgtgatgacgctttacgcgcagggcgtgctgacgccaaatgaatggctggatcttggtggcttaagctcgctttctgctgaagagtactttggtgccagcctttggcagctctacaagagtatcgattccccatacaaagcggtgctgaaaacactgctgctggaagcctactcctgggaatacccgaacccacgtctgctggcgaaagatatcaaacagcgtttgcacgacggcgagattgtatcgtttggcctcgatccatactgcatgatgctggagcgcgtcactgaatatctgacggctattgaagatttcacccgtctggatttagttcgccgctgcttctatttaaaagtgtgtgaaaaacttagccgtgaacgcgcctgcgtaggctggcgtcgtgaagtgttaagccagttggtgaaagagtgggaatgggacgatgctcgtctggcaatgctcgataaccgcgctaactggaagatagatcaggtgcgtgaggcgcacaacgagctgctcgacgcaatgatgcagagctaccgtaatctgatccgctttgcgcgtcgcaataaccttagcgtctccgccagcccgcaggatatcggcgtgctgacgcgtaaactgtacgccgcgtttgaagcattaccgggtaaagtgacgctggtaaacccgcagatttcgcccgatctctcggaaccgaatctgacctttatttatgtaccgccgggccgcgccaaccgttcaggttggtatctgtataaccgcgcgccaaatattgagtcaatcatcagccatcagccgctggaatataaccgttacctgaataaactggtggcgtgggcatggtttaacggcctgctgacctcgcgcacccgtttgtacattaaaggcaacggcgttgtcgacttgccgaagttgcaggagatggtcgcagacgtgtcgcaccatttcccgctgcgcttacctgcaccgacaccgaaggcgctctacagcccgtgtgagatccgccatctggcgattatcgttaacctggaatatgacccgacggcagccttccgcaatcaggtggtgcattttgatttccgtaagctggatgtcttcagctttggcgagaatcaaaattgcctggtgggtagcgttgacctgctgtatcgcaactcgtggaacgaagtgcgtacgctgcacttcaacggtgagcagtcgatgattgaagccctgaaaaccattctcggcaaaatgcatcaggacgccgcaccgccagatagcgtggaagtcttctgctacagccagcatctgcgcggcttaatccgtactcgcgtgcagcaactggtttctgagtgtattgaactgcgtctttccagcacccgccaggaaaccgggcgcttcaaggcgctgcgcgtctccggtcaaacctggggcttgttcttcgaacggctgaatgtctcggtacagaaactggaaaacgccatcgagttttatggcgctatttcgcataacaaactgcacggcctgtcagtgcaggttgaaaccaatcacgtcaaattaccggcggtggtggacggctttgccagcgaagggatcatccagtttttcttcgaagaaacgcaagacgagaatggctttaatatctacattctcgacgaaagcaaccgggttgaggtgtatcaccactgcgaaggcagcaaagaggagttggtgcgtgacgtcagtcgcttctactcgtcttcgcacgaccgtttcacctacggctcaagcttcatcaacttcaacctgccgcagttctatcagattgtgaaggttgatggtcgtgaacaggtgattccgtttcgcaccaaatctatcggtaacatgccacctgccaatcaggagcatgacgcgccgctgttgcagcagtatttttcttgatgctaatgccggaaagcgaggcttatccggcattagctcttaacgaaaactgacggtttctcccgcctgctgcgtcgcggcctgttccaataaatcccagaaggtttcgccgctgcgatcgcaaatccactcatcgcctttcagatcaaaatggtagccgccctgtttggttgccagccatacctggtgcagcggttcctggcggttgataatgattttgctgccgttctcaaaggtaatggttagtacaccgccgttgatttcacagtcgatatcgctgtcgccaccccagtcgtccagatgttcttcaatggtcagccacagttgatcagccaggcgatgaaattcactgtcgttcattgttgtatcctgtttttaagtgatggcggcagtatagcggcatggggtcagggcttcaaagtttgcccgtctgctgctgcgttccggcatgattcatccgtcaccggaataataatgtctctgttgtgaagttcatgcacattctcttctctgacgcgtgttttcgccgggcagggggagggcgtaatccttacctctgtatcggtccatgtataaacattgcgatcgtcataagcaaagcgatcgtttttagttagcgggccgttgttagttggaataatttgcacgctcttgcgtgaccgtaattggtggataaagtaagcatgctgtttgccgcgattaaatgagtgatcaatgaccaggtctggcgaatccagcgggattatttcaagctggtcttcaccaaaagtcgataattttgttacatacagccgatctttatactgcgcaatattgtcagtaatcagatgaaattgttcaggttcaataccttgtaggtctatccactggctccactgacggtcgggcgtgagctgtttacgccagcgaacgcgactttcccctacttcaaaagagacgtcatcatctacgggtatcgctttgccagataattgaccaaagggataacgatgcagacccttattgtcgcgaaaaaccagcagtgaatgaggtatccagcgaattatctcaaatgagtctgcattcgccgtaaggtgagcgccatttaaataaatattctgcccactgcggataagcagatcattggaatacaaatttctgtttacactcataagacgtggattaataccccaccatcttttttctaatacagtaacattactgctgctcccctgacgtcgaccggacaagtagagatttttactatccaccagcgtggtagagttaccttcgatagcttttagtgtcgccagatcaacacgtgacgcgccgctattactttcggtgcgctgtccgtcaaaatagaggctatatttatcgaccgcgaagcggcccatagcttgaaagctggcaatatcgacagtgggtgttcccggtggattgctaacgattttgccacgccagagaataacgcggccgtctgtcatccagtggtatgactcattttttatgcttatttcatcggaaggtatataacccgtcttcccagagatatttttcacaaggcgcaaatcggccctgttcatctccggaaattgggcaatgattttcttatccccccaataacctttaccgtaagacatgacaccgtgatcattgtaatagtcgaaccctatggcctgtacaggaggtgtcagaaatgagttccccaacaggatgagtgcaactgtgattatttgaccattcattttgttgcctcattgcgtggggcaggaataaattcgccgtcatcggtaatttttccgtccagatatcccgttttgtaatttacgccatagccatatcccgaatgttgttccttccagattaagcgaacttgtttcggatcagcggtgcggtatcgccagagctgcgcgccatcaaagctgtaaacgtagcggttatcgcgggcataccatctgcgcaaaaagggatggtcattaagatgggcttcgcgttcatccggagagcggttatccagtaagatcagcggtccgtcagattcaaacacgtgtaaactggaatggtttacccacccttcggcatgcgtaagtaaatagccgtggcgtttcccggcgttgaaacgtttgttgataataagattggggtcatcgagttttacgatctccaacttgcggtcaccagactctgtttcgatgatggtataaagcgaatcctgatactgggcgacagcatcactgatggggtggaactgttcaggatcgagtccggataattcttcctgtttacaagcaggccctttacgccagaacactttcttttcctgcagagaaaaatccagacagtgctttgttaaatcttcatcccacgccagattttccttgtcgaggactttacgctgcagcccgtttttatcacgccaggtgaagagtgagccgggcatccagcgcacgacggaaaaggtgtccgggtcggcatccagttgttctccgttgatcatgattttcgtctgtgtgcgggctagcgtatcccaggggccaaatggggcaggaaggcagggattaaatgctgtagagaatttaccgcgctgatcccatgacttttgagccagtaccgtaaaggtgtcgggatcatcaaggcgctgaccatttgcgtaaagatagtgcttgtcacggagaatcaaacctagccagtctggtttccattgcgggttaaattctacctgacgcaacgttcggcggtttagttgctggttgctatcggtgcgtttgccttcgtaatagaggctgtacttatctgcggcaaaatcaccccatgcctgaaatgacgagatatcgactggcggtgtgcctggagggttttgcacaatctcgccagcgtagagaatagcgcgaccatcgctatagtaagagtaatggggaagagttgcgtttgcgccgctgtagacaacgtctgtcatgagattggtagccgggggcaccgtttcccaatcctccagtttggttgggtcaattagcaaattcggtaacagacgcagacgcttgtagttaatctgcggtagcgaaagattggtcttttcataagggcgcaaatacaccacgccttttccctgtttctggtaaatattatgttccggctcatcaagccgacatccccatgccgacgataaaaacaacgaacaagacaataaacaaaccacattgcgatagtgcataaagccatcctggcgcgaggtgccgatcacgaaactaccagcaaaacataaatcgccacgtgtaagcgttatactcgcagcaattcctcacttttcagacttcataaagagtcgctaaacgcttgcttttacgccttctcctgcgatgatagaaagcagaaagcgatgaactttacaggcaatccataatgaaaaacgtgtttaaggcactcactgtattacttactctcttcagcctgacgggctgcggtctgaaaggtccgctctatttcccgcctgcagataaaaacgcaccgccgccgaccaaaccggtagagacgcaaacgcaatccacggtgccggataaaaacgaccgcgccactggcgatggtccatcccaggtgaattactaaaagtcagtttctgtacccgcgtgattggagtaaatgatgcagttctcgaaaatgcatggccttggcaacgattttatggtcgtcgacgcggtaacgcagaatgtctttttttcaccggatctgattcgtcgcctggcggatcggcacctgggggtagggtttgaccaattgctggtggttgagccgccgtatgatcctgaactggattttcactatcgcattttcaatgctgatggcagtgaagtggcgcagtgcggcaacggcgcgcgctgctttgcccgttttgtgcgcctgaaagggctgaccaataagcgcgatatccgcgtcagcaccgccaacgggcggatggttctgaccgtcaccgatgatgatctggtccgcgtaaatatgggcgaacccaacttcgaaccttccgctgtgccgtttcgcgctaacaaagtggaaaagacctatatcatgcgcgccgccgagcagacaatcttatgtggcgtggtgtcgatgggaaatccgcactgcgtgattcaggtcgatgatgtcgataccgcggcggtagaaacgcttggtcctgttctggaaagccacgagcgttttccggagcgcgccaatatcggttttatgcaagtggttaagcgcgagcatattcgtttacgcgtttatgagcgtggggcaggagaaacccaggcctgcggcagcggcgcatgtgcggcggtggcggtagggattcagcaaggtttgctggccgaagaagtacgcgtggaactccccggcggtcgtcttgatatcgcctggaaaggtccgggtcacccgttatatatgactggcccggcggtacatgtctacgacggatttattcatctatgaagcaaccaggggaagaactgcaggaaacactcacggagcttgatgaccgggcggttgtcgattatctgattaaaaatcctgagttttttatccgcaatgcgcgcgcagtagaagcgatacgtgtgccgcatccggtacgcggcaccgtttcgttggtcgagtggcacatggcccgcgcacgtaatcatattcatgttctggaagagaacatggcgctgttgatggaacaggcaatcgccaacgaaggcctgttttatcgtctgctctacctgcagcgcagtctcaccgccgccagcagtctcgatgatatgctgatgcgctttcaccgctgggcgcgcgatctcggcctggcaggtgcgagtctgcgcctgtttccggatcgctggcgcttaggtgcgccgtcgaactacactcatctggcattaagccgtcagtctttcgaaccgctgcgtattcagcgtctggggcaggaacagcactatctgggaccgcttaacggaccggagctgctggtggtgctaccggaagcgaaagcggtgggatcggtggcgatgtcgatgctgggaagcgatgctgatttgggtgttgtgctgtttaccagtcgcgatgccagtcactatcaacaagggcagggaacgcagttacttcatgaaattgcactgatgttgccggagcttctggcgcgttggattgaacgcgtatgaccgatttacacaccgatgtagaacgctacctacgttatctgagcgtggagcgccagcttagcccgataaccctgcttaactaccagcgacagcttgaggcgatcatcaattttgccagcgaaaatggcctgcaaagctggcagcaatgtgatgtgacgatggtgcgtaattttgctgtacgcagtcgccgtaaagggctgggagctgcaagtctggcgttacggctttctgcgctacgtagcttttttgactggctggtcagccagaacgaactcaaagccaacccggcgaaaggtgtttcggcaccgaaagcgccgcgtcatctgccgaaaaacatcgacgtcgatgatatgaatcggctgctggatattgatatcaacgatcccctcgctgtacgcgaccgtgcaatgctggaagtgatgtacggcgcgggtctgcgtctttccgagctggtggggctggatatcaaacacctcgacctggagtctggtgaagtgtgggtgatgggaaaaggcagcaaagagcgccgcctgccgattggtcgcaacgctgtggcgtggattgagcactggcttgatttgcgcgacctgtttggtagcgaagacgacgcgctttttctgtcgaaactgggcaagcgtatctccgcgcgtaatgtgcagaaacgctttgccgaatggggcataaaacaagggctgaataatcacgttcacccgcataaattacgtcactcgttcgctacccatatgctggagtcgagcggcgatcttcgtggtgtgcaggagctgctgggtcatgccaacctctccaccacgcaaatctatactcatcttgattttcaacaccttgcctcggtgtacgatgcggcgcatccacgcgccaaacgggggaaataatgcgtttttaccggcctttggggcgcatctcggcgctcacctttgacctggatgacaccctttacgataaccgtccggtgattttgcgcaccgagcaggaggcgcttacctttgtgcaaaattatcatccggcgctgcgcagcttccagaatgaagatctgcaacgcctgcgccaggcggtacgggaagcggaacccgagatttatcacgacgtgacgcgctggcgttttcgttcgattgaacaagcgatgctcgacgccgggctgagtgccgaagaagccagtgcaggcgcacacgcggcaatgatcaactttgccaaatggcgcagccggatcgacgtcccgcagcaaacccacgacaccttaaaacagctggcgaagaaatggccgctggtggcgatcaccaacggtaacgcccagccggaactgtttggtttggggcattattttgagtttgtgctgcgcgctggcccgcacgggcgctcaaaaccgttcagcgacatgtacttactggcggcggaaaaacttaacgtgccgatcggtgagatcttacatgtcggggacgatctcaccactgacgtgggtggggcaattcgcagcggaatgcaggcctgttggatcagaccggaaaatggcgatctgatgcaaacctgggacagccgtttactgccgcatctggaaatttcccggttggcatctctgacctcgctgatataatcagcaaatctgtatatatacccagctttttggcggagggcgttgcgcttctccgcccaacctatttttacgcggcggtgccaatggacgtttcttacctgctcgacagccttaatgacaaacagcgcgaagcggtggccgcgccacgcagcaaccttctggtgctggcgggcgcgggcagtggtaagacgcgcgtactggtgcatcgtatcgcctggttgatgagcgtggaaaactgctcgccgtattcgattatggcggtgacgtttaccaacaaagcggcggcggagatgcgtcatcgtatcgggcaactgatgggcactagccagggcggtatgtgggtcggcaccttccacgggctggcgcaccgcctgctgcgtgcgcaccatatggacgccaacctgccgcaggatttccagatcctcgacagtgaagaccagctacgtctgcttaagcgtttgatcaaggcgatgaatctcgacgagaagcagtggccgccgcgtcaggcaatgtggtacatcaacagccagaaagatgaggggctgcgtccgcatcatattcagagctacggcaacccagtggagcaaacctggcagaaggtgtatcaggcgtatcaggaagcctgtgaccgcgcgggtctggttgattttgctgaattgctgcttcgtgcccacgaattatggctcaacaaaccgcatatccttcaacattaccgcgaacgtttcaccaatatcctggtggatgaattccaggacactaacaacattcagtacgcgtggatccgactgctggcaggcgatactggcaaagtgatgatcgttggcgatgacgaccagtcaatctacggctggcgcggggcgcaggtcgagaatattcagcgtttcctcaatgatttccccggtgctgaaactatccgtctggagcagaactaccgctctaccagcaatattctgagcgccgcgaacgccctgattgaaaacaacaacgggcgtctgggtaaaaaattgtggaccgatggcgcggacggtgagcctatttccctttattgcgcttttaacgaactcgacgaagcgcgttttgtggttaaccgcatcaaaacctggcaggacaacggcggggcgcttgccgagtgcgccattctctaccgcagcaacgcccagtcgcgtgtgctggaagaggcgttattgcaggcgagtatgccgtatcgtatttacggcgggatgcgcttcttcgaacgccaggaaatcaaagatgcgctctcgtatctgcgcctgattgccaaccgcaacgacgacgcggcctttgagcgtgtggtgaatacgccaacgcggggtattggtgaccggacgttggacgtggtacgtcagacatcgcgcgatcgccagttaacactctggcaggcatgtcgtgaactgttgcaggaaaaagccctcgccggacgtgctgccagcgccttacagcggtttatggagctgatcgacgccttagcgcaggaaactgccgatatgccgctgcatgtacagactgaccgggtaattaaagactccggcctgcgcaccatgtacgagcaggagaagggcgaaaaaggtcagacgcgtatcgaaaacttagaggaactggtgacggcaacgcgccagttcagctacaacgaagaagacgaagatttaatgccgctgcaggcattcctctcccatgcggcgctggaagcgggcgaggggcaggcggatacctggcaggatgcggtgcagttgatgacgctacactcggcgaaaggtctggaattcccgcaggtgtttatcgttggtatggaagagggcatgttcccaagccagatgtcgctggatgaaggcgggcgtctggaagaagaacgccgtctggcctacgttggcgtaacccgcgcgatgcagaaactgacgctgacctacgcggaaacccgccgtctgtatggcaaagaggtttaccatcgcccgtcgcgctttatcggtgagttgccggaagagtgtgtggaagaggtgcgcctgcgcgccacggtaagccgcccggtcagccatcagcgtatgggtacgccgatggtcgagaacgacagcggctataagctcggccagcgcgtacgccacgctaagtttggtgaaggcaccatcgtcaatatggaaggcagcggcgagcatagccgtttgcaggtggcattccagggccagggtattaaatggctggtggcggcttacgcccgactggagacggtataatttacgattccgttgccagatgcggtgcgccacaccgcatccggcatcagtaacttacttagtgcacttcttcacatcaatattccagtcagcaccagacgcaacctgatgtttctgcgcgaaattatccatattcagcgccacggaaacattcaataagctgttcagatacaccatcggctggccttccggcacatcgccgaagcttgcgacatacggcattttccctgcgtatttttgctgggaaccttcggaaatggtcacacacaacgtgtcgttgagtttgattcctgcctgattcagcaactcgtcgctgatattgctccagacgttgccgtactgaatatcgagaatcgggatattgcccttcacttcaccttttgttgctttggctttctgataagaaagttcgacaacttttgcaggaagctctggccccacctgctcgaacgtgatcgccccggaagccagacgtgcaccggtgtaggcatacacatcacgaccgtggaaggtatatgacttttcggaacctttcagacggttggttttttcatcgatttgccggacgctctcaatacccagcgattccgccaccaacgtgagcgtaccgttatctggtgaaacgaagtactgaccgtttttggttttcagcactaccgatttacggtctgtaccaacaccaggatcgaccacgctaacaaacaccgaaccttgcggccagtaactggcagtctgatacaggcggtaagcgccttcccagatgttatatggtggaatttcgtgtgttaaatcaaatattttaagattatggtcaacgccgaaagcgacccctttcatcgtcgagacggcgccatctttcaggctaaaatccgtttgtaaaatcaaagcgttatccgcataagcggatgatgaccccagacaggttaataaaaataatgttgcgagcgtttttttcatttttgtttcccttcatttatctgatgattttccagctgtgtagccagccccagtttgtctggcctcctcgagtgtacaatgtttaacctttctgctcgacggaaatcatggtgacaaaaggatagcgttgccacgggattgcctcgcctttcatatacatatgtgaaattgtgccatcaagataaagcagctgctcaacgttcagtttcgctttggcataacaggcaaaatcataaaaatttgtcgcctgctggctcaacaaaaacacggcgttcccatgtttattaatcccaacaccgttacgaattttacgtgaggcgacgttgggatgaatacgcggattaattacaccgttttccatcaacaatggccctgactgcaccgcaaactgaatctctttactggttttaaaggcatccagacgaacgatgccgactttatctcccgcgacataaaacactccgccaggacgaataaagaaattcccttcacctgaagcgagatttaacgccaccttctgctgaccgttttcgatgtacaaaccgagcggcgcatagctttcatcatagatgccgccgttcatcgccatctgcacctgaccctgactattaatatccgccagcagagcatgtaacgttccccacgcttcgccattggctttttgccagtacattttcacccgctctgtttgaggattaacggtatacgcctgtacggtcagcgtcggatctgagggtgcgcaatcatcagcggcaacagcaaacaagggaagtaaggtgagggtgagaaaaatccgtttgagattcaaggtgatcattcctttaccaatgaatagccgatgcgccattataggccctgaatgtgggatttttttatcctgttagcgaccttgacgagtaccaaaaagcgcgaagttcaactattgttctgtggtgttctgttgcgtgttgacggcaaaattttgctggcgtaacatgcgcgcacgatcactctaagaggacattcgccttggacacacccagtagatactggctcattatcctgtcatccaggatcaactcctaaggctatccctttttgctgatagccttagcggttgtcagcgacctcaatttttcccgtcgcgctgagtcaggctgtttaatggtctgaaacccaatttgtttctgtgtgcccaccgaactgtccgatattttaagcattgggagtcccggtcatgctgagcgcatttcaactggaaaataaccgactgacccggctggaagtcgaagagtcacaaccccttgtaaatgcagtatggattgatcttgtcgaaccggacgacgacgagcgactgcgcgtacaatctgaacttggccagagcctggcaacccgcccggaactggaagacatcgaagcatcggcacgtttctttgaagacgatgacggcctgcatattcactccttcttcttctttgaagatgcggaagatcacgccggtaactccactgtggcatttaccatccgtgatggtcgtctgtttactctgcgtgagcgtgaactgcccgcttttcgtctgtatcgtatgcgtgcccgtagccagtcaatggtggacggtaacgcctacgagctgctgctggatctgttcgaaaccaaaatcgaacagttggcagatgaaattgaaaatatctacagcgacctggagcagttgagccgggtaattatggaagggcatcagggcgatgagtacgacgaggcgctctccacgctggcggaactggaagatatcggctggaaagttcgcctgtgtctgatggatacccagcgcgcgctcaacttcctggtacgtaaagcacgcttaccgggtgggcaactggagcaggcgcgtgaaatcctgcgagatatcgaatccctgctgccgcataacgaatccctgttccagaaggtgaacttcctgatgcaggcggcgatgggctttatcaatatcgagcagaaccgcatcatcaaaatcttctcggtggtatccgtggtgttcctgccaccgacgctggtcgcttccagctacgggatgaactttgagtttatgccggaactgaagtggagcttcggctacccaggcgcgattatctttatgatcctcgcgggcctggcaccgtatctgtactttaagcggaagaactggttgtaatataaatgccgggtaaagattgttctttatccggcttattgctgaaaattgtctttttcaaagtcatgcgggttgaacactcgctctatcttattttcctgggttagttgatactcattgttatcagcaataaaaaaatgagtattacggtaaggatattcattaataaccattaaatagttttttacgatgcaattatcattgctcttaatcgtcgggaaacagtagagatcttcatacggcccttcgatatattttttatagtcagtgaagccattaccgatatcaataacataccaggtatgccaactaccttctggtaggggattttgacttttaatttcatcctgatgcttcagataccaatttattttatcgctatcagtccatggcagatgatcaacgaccagaaagactgaattgccagcatcagagtatgtatacaaaatctgtacaggacgcaatgtccataaattatagatgcagcatagaagaaataaatataatataattttctggagttttcttttcatagataattttcgattctttcgatagtgttaaaattggtgaaaaaaggtttgaaagcaaagtctttatgccgttgtaaaaagaaccatatgcgaaaaaatctatacttgttgtaaatcttgttttttatatcagtcacatccaaaccaaagtggtcttgtgctatgaaatgaatggtagcgctccagcccataggatatttttgaaaatttaaaagagatattttttgagctgagatatcatgaatgctgattcccaggccattaaaattatctttaaaatcattgaatttatttagtcttgatgaaagtaattcggtcttaatcttttgtaggagaagaggccggtatcctatcgtaggtgttgaagaaatatcattttcgatacattctttgattacacgtattgggctattataatcatatttgtttattcgttcatgaaaagataagttcaattcctggctatggaaactgttgccatttccatatctaaaatgatcaatcagatcctggatgagtgttttgtattgtccaaaaaaggaaaacatttttgccagatctttcatttctgcaaataaaatatcaatacattcactttgtgatatttttgttccagaagttggaacactaaaagcaccataagtagaattcggcccaggaaaatggtatttaatgaggcggtaaggatcaacttttgcagagatgtcgcttaagccgagtgagagaaaatcttgttcttccatatccccatactgcatatcatcagcagaaaaatcatcgaataaagtaatagtttcgaaaagtgtacagggcatattaattgatgagcctaatatgttgttcatttatattctcctttcttataattaagggcaatgttaatttgataagaaataatagggtaaaaaaattttaaaaaagaaatgcacttcacatttttcattacattctgaagagaacttggttaatgattggtcttgctcatcgctaataacataatgctgaatttaccaaaaatgaaatttattaaagcaaatgaaaatatacaacgacgtctggaaattctgcctttccttatgtgagtctcctgtcagcatggcaatatgcccactctcatgcaagagtcggcatattttttcagaatatatttattttttatttggacgttctatgctgcgtataaatcgcatccatcacaaaaattgccagcgccacccaaataaaggcgaaagttaccatcttatcggcacccggtttttcaccataaaacgtcacagccagcaggaacatcagcgtcggaccaatgtactggaaaaagcctaacgttgagagacgcaggcgtgtcgccgctgcagtaaaacacaacagtggcacggtggtgacaataccggcggcgatcagcagtaaattcagcgacatcgggttttgccccatatgactggttgagctgtcggcaatagcaaacaggtaaatcgccgccacgggcagcaaccacatagtttcgattaacatgccggtttgcgcttcaacagcaatcttcttgcgcaccaggccgtagaaagcaaaactaaacgccagccccagcgcgatgatcggcagtgaaccaaaagtccacaactgaaccagcactccacatatcgccagaatcaccgccagccattgcatccggcggaatcgctcgccgaggaaaatcatccccagcacaatgttcaccagcgggttaataaagtaaccaaggctcgcttccagcatatggtgattgttcaccgcccagataaacagtagccagttgccgccaatcagcacggcagagactgccagcataaaaattttctgtggcgtctgaatcagcgtttttaaataggaccactggcggcaaatgctcatcagcaccaccataaagaaaaacgaccagatcacgcgatgcgtcaggatctcatcggcgggcacgtagtaaatcagtttgaagtacgctggcgcaataccccaaataaaataagcggcaagagcgagtaatacgccctgccgcgtttgttttgcatccatcgggaatactcatttttaattggtaacagcagtttacctgcttttatgtcttcaacctaccatataggtggcggtggcactggcaatataaagctgttcttcattgtgtaattcaacgcgggcgacggcgactttattgcctgcacgtaacaggctactggtagcagtaaaacgctcgcctctgcctgggcgcagataatcgacgcgaagatcaatggtccccatccgcgatagccgctggcgtagttcatcttcactgatggtttcgtggcgggttaaggtacttcccacgcacaccagacctgcggcgacatccagcgccgacgcaatgaccccgccgtgtaaaatgctttgcgcccagttgcccaccatcatcggctgatttttaaaggccagctgtgcgaactctttttcgtaacgctccagttccatccccaatgcgcggttaaatggcatgtgataaacaaacatctcacccactaatttgagggcttgttcagcggtcagtacggcagacataacatccttacacttcattagttaatgaaatgttgattttatgcttctttattgttggtttccactttaggaagggataactaacggctatggagttaagtatgtaaaatagcccgcagaaaatattcaccttatcaataattcgttacggagaacacgagcgatgcggactctgcagggctggttgttgccggtgtttatgttgcctatggcagtatatgcacaagaggcaacggtgaaagaggtgcatgacgcgccagcggtgcgtggcagtattatcgccaatatgctgcaggagcatgacaatccgttcaccctttatccttatgacaccaactacatcatctacacccaaaccagcgatctgaataaagaagcgattgccagttacgactgggcggaaaacgcgcgtaaggatgaagtaaagttccagttgagcctggcgtttccgctgtggcgtgggattttggggccaaactctgtactgggcgcctcctacacacagaaatcctggtggcagctttctaatagcgatgagtcatcaccgtttcgtgaaactaactacgaaccgcaattgttcctcggttttgccacggattacaactttgctggctggacgctgcgcgatgtggaaatgggctacaaccacgactcaaacgggcgttcagacccgacttcccgcagctggaaccgcctttatacccgcctgatggcagaaaacggtaactggctggtagaggtgaagccgtggtatgtggtggggaatacggacgataacccggacatcaccaaatatatgggttactaccagcttaaaatcggctatcacctcggtgatgcggtactgagcgcgaaagggcagtacaactggaacaccggttacggcggcgcggagttaggcttaagctacccgatcaccaaacatgtgcgcctttatactcaggtttacagcggttacggcgaatcgctcatcgactataacttcaaccagacccgcgttggtgtgggagttatgctaaacgacctgttttgatgaatggttggcaaatctggaatccagcatccaggattaccctctcagagactaaaagcattgcagtttctcgcgcaggcgctgaaaatagcgcctgtttttatttcaggcaatcggggtgaatgtggcgcaggcggaagtgttgaatctggagtccggagctaaacaggttttacaagaaacctttggctaccaacagtttcgccccggccaggaagagattatcgacaccgtactttccggtcgcgattgcctggtcgtcatgcccactggtggcggaaaatccctttgctatcaaatccctgccttattgctaaacggccttaccgtggttgtctcaccgctgatttcgttgatgaaagatcaggtagatcaactgcaagccaacggcgtggcggcggcgtgccttaactcgacgcaaacccgcgagcagcagcttgaagtaatgacaggctgccgcaccgggcaaatccgcctgctttatatcgcgccggaacgcctgatgctggataactttcttgagcatctggcgcactggaatccggtgttattagccgttgatgaagcgcactgtatctcccaatggggtcacgatttccgcccggaatacgctgccctcggtcagctgcgtcagcgttttccgacgctcccgtttatggcgctgactgccacagccgatgacaccacgcgccaggatattgtgcgcctgctggggctgaacgatccgctaattcaaatcagcagttttgaccgtccgaatattcgctacatgctgatggagaaattcaaaccgctcgatcagttgatgcgctacgtacaggaacaacgcggtaagtcgggaattatctactgcaacagccgcgcaaaagtagaagacaccgctgcacgcctgcaaagcaagggaattagcgcggcggcctatcatgccgggctggaaaataatgttcgcgctgatgtgcaggaaaaattccagcgcgatgacctgcaaattgtggtggcgacggtggcgttcggcatgggcatcaacaagcctaacgttcgcttcgtggtgcattttgatattccgcgcaatatcgaatcctattatcaggaaactggacgcgccgggcgtgatggcctgcccgcggaagcgatgctgttttacgatccggctgatatggcgtggctgcgccgttgtctggaagagaagccgcaggggcagttgcaggatatcgaacgtcataaactcaatgcgatgggcgcgtttgccgaagcgcaaacttgtcgtcgtttggtattgctgaactattttggcgaagggcgtcaggagccgtgcgggaactgcgatatctgcctcgatccgccgaaacagtacgacggttcaaccgatgctcagattgccctttccaccattggtcgtgtgaatcagcggtttgggatgggttatgtggtggaagtgattcgcggtgctaataaccagcgtatccgcgactatggtcatgacaaactgaaagtctatggcatgggccgtgataaaagccatgaacattgggtgagcgtgatccgccagctgattcacctcggcctggtgacgcaaaatattgcccagcattctgccctacaactgacagaggctgcgcgtccggtgctgcgcggcgaatcctctttgcaacttgccgtgccgcgtatcgtggcgctcaaaccgaaagcgatgcagaaatcgttcggcggcaactatgatcgcaaactgttcgccaaattacgcaaactgcgtaaatcgattgccgatgaaagcaatgtcccgccgtacgtggtgtttaacgacgcaaccttgattgagatggcggagcagatgccgatcaccgccagcgaaatgctcagcgttaacggcgttggtatgcgcaagctggaacgctttggcaaaccgtttatggcgctgattcgtgcgcatgtcgatggtgacgacgaagagtagtcagcagcataaaaaagtgccaggatgaagactccgtaaacgtttcccccgcgagtctaatgtatgttgatgttattcctcaccgtcgccatggtgcacattgtggcgcttatgagccccggtcccgatttcttttttgtctctcagaccgctgttagtcgttcccgtaaagaagcgatgatgggcgtgctgggcattacctgcggcgtaatggtttgggctgggattgcgttgcttggcctacatttgattatcgaaaaaatggcctggctgcatacgctgattatggtgggcggtggcctgtatctctgctggatgggttaccagatgctacgtggtgcactgaaaaaagaggttgtttctgcccctgcgccacaagtcgaactggcgaaaagcgggcgcagttttcttaagggcttactgaccaatctcgcgaaccctaaagcgattatctactttggttcggtgttctcgctgtttgtcggtgataatgtcggcaccaccgaacgctggggcattttcgcgttgattattgtcgaaacactggcgtggtttaccgtcgttgccagcctgtttgctctgccgcaaatgcgccgtggttatcaacgtctggcgaagtggattgatggttttgccggggcgttatttgccggatttggcattcatttgattatttcgcgttaatgccagacgcgtcatcagagtaagtcggataaggcgtttacgccgcatccgacattattttcacgcatgcctcgccgatgctaacagcgctcccaccagcataaataacgagccgaaaatcttattcagcgccttcatctgctttggtcctttaatccatagagcaatccgttgagcaagggtggcgtaaccgatcatcacaataatatcgaccacaatagtggtgacgccgagcacgatatactgcatcagttgtggctgctgcggcatgatgaattgcggaaatagcgccgccagaaacacaatacttttgggattggtgagattcacaaaaactgcgcgctggaacaaatgtcgacgcgattgagtggaggccagcgatttaagatcaattgcgccagcggcgcgccattgctgtattcccagccaaatcaagtaagctgcgcctgcccacttcaacacttcaaacgcaatcactgagcgggaaaatagcgtccccaaccccacgccaaccagcacaatatgaatcgccagtccggtctgaagcccagcaatagacgccaccgcgccgcgataaccgtggttgagcgaggtggtcatggtgttgattgcgccagagcctggcgacaggcttaaaatgatcgatgtcagcaggtaggcaaaccaccattctaaggtcatgatgaactcccggtgtgtctatttttgtgccacaatacgctactgtcgcagcgttgtgtcaggcacgcttaaaaaaacgattttacgtggtttaagaggcagattacccgatgtttcagcagcaaaaagactgggaaacaagagaaaacgcgtttgctgcttttaccatgggaccgctgactgatttctggcgtcagcgtgatgaagcagagtttactggtgtggatgacattccggttcgctttgtccgttttcgcgcacagcaccatgaccgggtggtagtcatctgtccggggcgtattgagagctacgtaaaatatgcggaactggcctacgacctgttccatttggggtttgatgttttaatcatcgaccatcgcgggcagggacgttccggtcgcctgttagccgatccacatctcgggcatgttaatcgctttaatgattatgttgatgatctggcggcattctggcaacaggaggttcagcccggtccgtggcgtaaacgctatatactggcacattcgatgggcggtgcgatctccacattatttctgcaacgccatccaggtgtatgtgacgccattgcgctaactgcgccaatgtttgggattgtgattcgtatgccgtcatttatggcacggcagatccttaactgggccgaagcgcatccacgtttccgtgatggctatgcgataggcaccgggcgctggcgcgcgttgccgtttgctatcaacgtactgacccacagcagacagcgatatcgacgtaacttacgtttctatgctgatgacccaacgattcgcgtcggtgggccgacctaccattgggtacgcgaaagtattctggctggcgaacaggtgttagccggtgcgggtgatgacgccacgccaacgcttctcttacaagctgaagaggaacgcgtggtggataaccgcatgcacgaccgtttttgtgaactacgcaccgctgcgggccatcctgtcgaaggaggacggccgttggtaattaaaggtgcgtaccatgagatcctttttgaaaaggacgcaatgcgctcagtcgcgctccacgctatcgttgattttttcaacaggcataactcacccagcggaaaccgctctacagaggtttaaatttcttatgtaccaggttgttgcgtctgatttagatggcacgttactttctcccgaccatacgttatccccttacgccaaagaaactctgaagctgctcaccgcgcgcggcatcaactttgtgtttgcgaccggtcgtcaccacgttgatgtggggcaaattcgcgataatctggagatgcaaaccaccattctaaggtcatgatgaactcccggtgtgtctatttttgtgccacaatacgctactgtcgcagcgttgtgtcaggcacgcttaaaaaaacgattttacgtggtttaagaggcagattacccgatgtttcagcagcaaaaagactgggaaacaagagaaaacgcgtttgctgcttttaccatgggaccgctgactgatttctggcgtcagcgtgatgaagcagagtttactggtgtggatgacattccggttcgctttgtccgttttcgcgcacagcaccatgaccgggtggtagtcatctgtccggggcgtattgagagctacgtaaaatatgcggaactggcctacgacctgttccatttggggtttgatgttttaatcatcgaccatcgcgggcagggacgttccggtcgcctgttagccgatccacatctcgggcatgttaatcgctttaatgattatgttgatgatctggcggcattctggcaacaggaggttcagcccggtccgtggcgtaaacgctatatactggcacattcgatgggcggtgcgatctccacattatttctgcaacgccatccaggtgtatgtgacgccattgcgctaactgcgccaatgtttgggattgtgattcgtatgccgtcatttatggcacggcagatccttaactgggccgaagcgcatccacgtttccgtgatggctatgcgataggcaccgggcgctggcgcgcgttgccgtttgctatcaacgtactgacccacagcagacagcgatatcgacgtaacttacgtttctatgctgatgacccaacgattcgcgtcggtgggccgacctaccattgggtacgcgaaagtattctggctggcgaacaggtgttagccggtgcgggtgatgacgccacgccaacgcttctcttacaagctgaagaggaacgcgtggtggataaccgcatgcacgaccgtttttgtgaactacgcaccgctgcgggccatcctgtcgaaggaggacggccgttggtaattaaaggtgcgtaccatgagatcctttttgaaaaggacgcaatgcgctcagtcgcgctccacgctatcgttgattttttcaacaggcataactcacccagcggaaaccgctctacagaggtttaaatttcttatgtaccaggttgttgcgtctgatttagatggcacgttactttctcccgaccatacgttatccccttacgccaaagaaactctgaagctgctcaccgcgcgcggcatcaactttgtgtttgcgaccggtcgtcaccacgttgatgtggggcaaattcgcgataatctggagattaagtcttacatgattacctccaatggcgcgcgcgttcacgatctggatggcaacctgatttttgctcataacctggatcgcgacattgccagtgacctgtttggcgtggtcaacgacaacccggagatcattactaacgtttatcgcgatgatgaatggtttatgaatcgccatcgcccggaagagatgcgctttttcaaagaagcggtgttcaattatgcgctgtatgagccgggattgctggagccggaaggcgtcagcaaagtgttcttcacctgcgattcccatgaaaaacttctgccactggagcaggcgattaacgctcgctggggcgatcgcgtcaatgtcagtttctctaccttaacctgcctggaagtgatggcgggcggcgtttcaaaaggccatgcgctggaagcggtggcgaagaaactgggctacagcctgcaagattgtattgcctttggcgatggaatgaacgatgccgaaatgctgtcgatggcggggaaaggctgcattatgggcagcgcgcatcaacggctgaaagatctgcatccagagctggaagtgattggtactaacgccgaagacgcagtgccgcattatctgcgtaagctctatttatcgtaattgttctttatttggtcagttgtcaacctgatacttcgctacaatggatactcgttaatcaaagagttttccattgtggcgctacttatcatcaccacgattctgtgggccttctcctttagcttttatggcgagtaccttgcggggcacgtcgatagctattttgcggtgctggtgcgcgttggtctggcggcactcgtttttctgccgtttctgcgcacccgtggcaatagcctgaaaacggttggcctgtatatgctggtgggcgcgatgcagctcggtgtgatgtatatgctgagtttccgcgcctatctctacctgacggtctccgaactgttgctgttcaccgtactgacgccgctctacatcacgctgatttatgacatcatgagtaagcgccgtctgcgctggggctatgcttttagcgccttgttggcggtgattggtgccgggattattcgctatgatcaggtcaccgaccatttctggactggcttattgctggtgcaactctccaatatcacttttgccatcggcatggtgggttacaaacgtctgatggaaactcgcccgatgccgcagcataacgcctttgcgtggttctatcttggcgcgttcctggtggcagtgattgcatggttcttgctgggaaatgcgcagaaaatgccgcaaaccacgttgcaatggggcattctggtgtttcttggcgtggtggcttccgggattggctactttatgtggaactacggcgcgacgcaggtggacgccggaacgctgggcattatgaataatatgcacgttccggcagggctgctggtaaacctggctatctggcaccaacagccgcactggccaacgtttattacaggcgcgctggtgatcctggcctcactgtgggtgcatcgtaagtgggtcgctccgcgctcttcacaaacggcagatgatcgcaggcgtgattgcgcgctgaacgaataaacgcttctgtaatcggctgacgctgctcgccatcgcgcacggcggcgtacagtcggctccacaagccttcgcccagggttttggtgaccaccagaccctggcgttcaaaactctccaccacccaatgcggtagtgcggcaatacccatccgtgcggcaaccatctgaatcaacaataaggtgttatcgacgcttttcagtgacgggctgacgcctgctggctgaagaaaatgcctccagacatccagtcggctacgctgcaccggataaatcaacagcgtttcgctggcgagatcttccggtgtaatacgcgtttttgccgccagtggatggtcaggtgctaacaccagacgcacttcatagtcgaacatcggcgaataatgcaggccactgcgcggcagaatatcggacgtcatcaccagatccagctcgccctgttgcaacgcaggctgcggatcaaacgttacgcccgatttaaaatccatctccacctgcggccagttcttatggaaactttctaatgcgggcgtcagccactgaatacagctatggcactctatggcaatgcgcaggcgcgtctgctgcggttcattgcaggcttgcagtgcctggctaatttgcggcagcacctgatttgccagttgcaacaggatttctccctgcggtgtaaagcgaagcggctggcttttacgcacaaatagccggaagccaaggcgttgttccagatcgctaaactggtgagacagggcggattgcgtttgatgcaacgtcgccgcagcggctgcgagtgagccgcagttccgcaacgcttgtagcgttttcaggtgttttacttcgatcatgaaagtccttcacttcggcatgaataatttgcgcttgaggaatatacagtaaccgccaattatggatgtgtaaacatctggacggctaaatactaaaaattccataaggggcatataatgacaattcttaatcacaccctcggtttccctcgcgttggcctgcgtcgcgagctgaaaaaagcgcaagagagttattgggcggggaactccacgcgtgaagaactgctggcggtagggcgtgaattgcgtgctcgtcactgggatcaacaaaagcaagcgggtatcgacctgctgccggtgggcgattttgcctggtacgatcatgtactgaccaccagtctgctgctgggtaatgttccgccacgtcatcagaacaaagatggttcggtagatatcgacaccctgttccgtattggtcgtggacgtgcaccgactggcgaacctgcggcggcagcggaaatgaccaaatggtttaacaccaactatcactacatggtgccggagttcgttaaaggccaacagttcaaactgacctggacgcagctgctggaggaagtggacgaggcgctggcgctgggccacaaggtgaaacctgtgctgctggggccgattacctacctgtggctgggtaaagtgaaaggtgaacagtttgatcgcctgagcctgctgaacgacattctgccggtttatcagcaagtgctggcagaactggcgaaacgcggcatcgagtgggtacagattgatgaacccgcgttggtactggaactgccgcaggcgtggctggacgcatacaaacccgcttacgacgcgctccagggacaggtgaaactgctgctgaccacctattttgaaggcgtaacgccaaacctcgacacgattactgcgctgcctgttcagggtctgcatgtcgatctcgtacatggtaaagatgacgttgctgaactgcacaagcgtctgccttctgactggctgctgtctgcgggtcttatcaatggtcgtaacgtctggcgcgccgatcttaccgagaaatatgcgcaaattaaggacattgtcggcaaacgcgatttgtgggtggcatcttcctgctcgttgctgcacagccccatcgacttgagcgtggaaacgcgtcttgatgcagaagtgaaaagctggtttgccttcgccctgcaaaaatgtcatgaactggcattgctgcgcgatgcgttgaacagtggtgatacggcagctctggcagagtggagcgctccgattcaggcgcgtcgtcactctactcgtgtacataatccggcagtagaaaagcgtctggcggcgatcaccgcccaggacagtcagcgtgcgaatgtctatgaagtgcgtgctgaagctcagcgtgcgcgttttaaactgcccgcgtggccgaccaccacgattggttccttcccgcaaaccacggagattcgtaccctgcgtctggattttaaaaagggtaatctcgacgccaataactaccgcacgggcattgcggaacatatcaagcaggccattgttgagcaggaacgtttgggactggatgtgctggtacatggcgaggccgagcgtaatgacatggtggaatactttggcgagcatctggatggctttgtctttacgcaaaacggttgggtacagagctacggttcccgctgcgtgaagccaccgattgttattggtgacgttagccgcccggcaccgattaccgtggagtgggcaaaatatgcgcaatccctgactgataaaccggtgaaagggatgttgaccggcccggtgactattctctgctggtcgttcccgcgtgaagatgtcagccgtgaaaccatcgccaaacaaattgcgctggcgctgcgtgatgaagtcgcggacctggaagccgctggaattggcatcattcagattgacgaaccggcattgcgcgaaggtttaccactgcgtcgcagcgactgggatgcctatctccagtggggcgtggaggctttccgtatcaacgccgccgtggcgaaagatgacacacaaatccacactcacatgtgttactgcgagttcaacgacatcatggattcgattgcggcgctggacgcagacgtcatcaccatcgaaacctcgcgttccgacatggagttgctggagtcgtttgaagagtttgattatccaaatgaaatcggtcctggcgtctatgacattcactcgccaaacgtaccgagcgtggaatggattgaagccttgctgaagaaagcggcaaaacgcattccggcagagcgtctgtgggtcaacccggactgtggcctgaaaacgcgcggctggccagaaacccgcgcggcactggcgaacatggtgcaggcggcgcagaatttgcgtcggggatgatgagtattaacgagtcattgtaaattgcagtacgataatggcttccagtactggaagccattttgcatgagtgccagattgaagcagatcttcaggagtagaaataaccgaatcgtttttttcgcaaaacacagttttgagtgattccgttcagtaatcaacgctacgttatttattctcacgttgcacgagattgtatcccttttcactaacgtggtagtgaggcatagacttatgcccgctatcctcaataataaccaaaccttcgttagctaatttgttaacaatattaacaacattaccgaatcctggtatttgccttatggatagtgtgcgatcgagattcatccagttccagtttatatctttctcagtcataacgttcagcacgttaagttcatttttagtgatcacgatattctgtaccaaaattgatgagtatcttattgaaagatcacaatgtaaatcatgctcctgtaatggctggatcagaagaggttgtcttgttgttctttgataagattcaatccatattgagaaactctgtagcgtggtttagagttgccctcaccatttacgatatcaaccaacccatgattaaccagctttgttacgatattcgctacgttgccaaatcctggaatatttcgtatagctaaagtacgatccagcaccatccagctccagtcaatatctttctcagccataactttcagcacgttaaattcaactatcgtaatcgtcatttttttgcatccggatgaaataagtcagtatctttaattttaaagtcttctagagttgcagtatgtgcattattccataattcatatccatctaaaccattcggttcacctgtttcccatcctaaattacaataacgctgatactcgcggcattcatgagtatagtagttcagatcgtatttttcaggaagcaattctttatttgctattttttttagccttgaaatcattacatcattagctggatcatgatcaaatctggagatatgcttttcaacaatagcgataccttccctattgattgttacgccatctatcgtcaggttttctattggaccaccggcaaggtcgggattaaatggtcttcctgatactgctcctctggctccgaaatgctcaaatgattccaaatcagggaatctcattcttcccagaacaactccagcaactattgaagcaccagcgatgagtaaccctttgttatccataacttgatcgtaaccagcaggtgcatctcctcccaacttgtttgctgtttccctgaatccttcgatattcccattgtatatgccgccagcagcaagcagtctgccaaccgctttactattgagtgttttgaggccattattatctttagttttttgccgtggtataaacagacggttgtagttatcgggaaatgccaaatgactaaattcagtattagcaatcagatgcctggagagtatatattcataactgacagtgatggtttctgtatccagattgttctcagtaaacaggtgattgattgctgataagagcgcgccgcggagttgaatgttgtaatatttctcctatcgaccaaatctattgatccgatagaagtcaaactccatgaacaactgctcgttattgttaatagcgttaataagtaacggggagcttttgtcaatcaacttacagaaactaaggccatgtaattgtgaccctttgcctgtattcgtaatactattagatagcgagaacgcgaagatttcatcttcatggccaatctgccagcgattacctattgatgcgctcgttccgcaacgagaggaaatacatccttgttgttctccggttatggtcaggtaaatttcatcactcatctttgatgaactctctttattgcttgatgttttaaaaataaacaatattgctatttgtttataattatttactcctcaagttaatggatttaaatatgggaaataaaatgtttcactttagaccagttttcatgaggaaaatctgtaatcattaataataaacatgaatattttgcagtgattaatatttgttatgaatataatctataacaatgaagagttatcagttgttcggtgtatagccagagacgagttcagtttgtgatttttacagggcagttacagccgcaaaattttatggctgatttcaccttcccctcaagcttatctttcttaaaaagagaaataattcttaaattcaaatagttatatacaatctactctctttcttgtgactagcttcacatttcatactgatgcattggaatgaaataaaatttcatgagattttgtgttttagaaaaattatttcatgaggtgtgaaatggacgcaaagctgtacatcactgagatcatcaatgaattaaccttcgttaaggactctatccgtgaggatgactgcaccaaattgatcgacgctattcagcaaagccagcgcgttttctgctatggcctggggcgtgccggcttttccatgaaagccttcaccatgcgcctgatgcatatgggcaaagaggtttacttcctgacggaaaccattacgccgaactttgggcctggcgatctgtttatcgtttcttccgcttccggtgagacagcacaactggtggcactggcgaaaaaagcacgtcagtttggcggcgctgtggcggtgttaaccacgaatcgacacgccactatcaccgagtttgtcgacgtcatcgtgcaaatcaatgccccttccaaaaatcaaaaagattctgttttccgctcggcacagccgatggcgtcgttgtatgagcaagctttgctggtgattgccgatgcattagtgatgaagatggctgctgaaagcggtgcgccggaaagtgaactgtttaagcgccacgccaatctggaatagtcgtcgccgttatttgctcgataccctacaggagaataaaaatgagcaaaaaaataacatccttgtttaacttcaagaagttgcagaaattttcttctgctctgatgttaccaatcgccattcttccggcggcgggtttgattttagccatcgggatttcatttaacattgagctgctggcgaattgcggcggcctgattttcgccaaccttcctttgctgttttgtgtcggtattgtgattggcctgacaggtgatggttcttcatcactttcagcgattatcagttacatgatcatgaatgccacgatgggaacgcaacttggcattaccgcggagtccgttgcagccagtaacggtgactatgcgatgatcctcggggtaccgacgttacaaacgggagtgtttggcggtttgattgtcgccatctttgtttatctgctctatacccgcttccacaatattgaattgcctcagtttcttggtttcttcggtggaaaacgctttgtaccgattattacggcggtggcggcaattattgtcggctatttattgccgtggctgtggataccggtacaaaaaggtctggcgtcgctttcaacgctggtgaccagtgggcataacgcgaacttcgcggcctttatttacgccgttggcgaacgttcgctgattccttttggcctgcatcatatctggaacgtgccgttttattacaactttggcgactacatgaccaaatccgggcaactggtgacgggcgatattccggtgttctttgcccaattgcgcgacggtgttccgttgacggcggggttgtttatgacaggtcgtttcccgatcatgatgtttgcgttacctgccgccgcgttggcgatgtatcaggaagcaaaaccggaacgtaaggcgctgattaaaggccttttactctccggtgcgctgaccacatttgttaccgggattacggagccgctggaatatgcatttttgtttgcagctccggttctctacatcattcacatcttcttatatgccacttcatttgtgctgatgaacatcctgaatgtgcacattggtcatccttttgctggcggtcttattgatttcgtactgaatggcgttatgccaaaccgcacgccgtggtatctggtgttcctggcaggcgcgggctatgcagcgatttactacaccgtatttcgggtactgatccgcaagttgaatctgaaaacaccggggcgtgaggatgaagagattgccgttgcaaccacattaacgcgcgaagaacgtccataccaaatcatcgaagcagtaggtggtttcgacaatatcgaagatgtggatgcctgcgcaacacgcctgcggctggcgctggtagacgataagaaagtgaatgaaaaacggctgaaggagttgggggctgcgggtttagtgaaactgggtgatggcggtgtacaggtgatatttggcggcaaatcgcaaatcctgcgcgacgaaatcaaaaccgtaatgagcagaccgcgcccgacagaaatgacagtggcctgtgctaactaattcgagattagcgggctggtttcagcccgccagacagagagagctgaagtatgaattcacaattactggctaacgccatccggatgttaagtgttgatgcgatccagaaagcgaactccggtcatccgggcgcgccgatggggatggcggatattgccgaagtggtctggcgtcgtcacctgcgtcataacccaaaaaatccgcagtggtttaaccgcgaccgctatgttcagtcgaacgggcacggttccatgttgatttacgctttgctgcatcttacaggctacgacctgtcgatggatgatattcgcgactttcgtcagctccactcccgcacgccaggtcatccagaatatggttatacgccgggtgttgaaaccaccaccggcccgttggggcagggcgtagctaatgcggtggggatggcgattgcggagaaggcgctggcggcagaatttaacaaaccgggctttaatattgttgatcatcacacatggctatttttgggtgatggctgcctgatggaagggatctcccacgaggcctgtggtcttgcaggaacgctgaagctcggcaatctgattgctatctgggacgataacggtatttcgatcgatggtcacgtagaaggctggtttgctgaagatacggctgcccgttttcgtgcctacggctggcatgtcattgaaggcgttgatggtcacgatccagaagaggtagatgctgcggtgcgtgaagcgaaaagcgtcacggataagcccagtctgctgtgctgcaaaacgattatcggttttggttcgccaaataaagccaacagccacgattgccacggctcggcgctgggtgcagatgaagtggcgctggtgcgtgaacgtctgcaatggccgtatgcccctttcgaaattcctggtgaaatttatgccgcatgggatgcgaccgagaaaggcgcgcaggttcaacaggaatgggatgcactgtttgccgactacgcgaagcagtggccggaactggcggcggagtttactcgtcgcatgaagggtgatttgcctgctggctgggtcgagaatatgcagaaatatgtgcacgatctgcaatcccatccggcggcgctggcaacccgtcaggttagccagaaatgcctcaatcacttcgcagatatgctgccggaactgatgggcggctcggcggacttgtcgccctctaacctgactcgccatcagaaatcggttgatttcaccggagaaaatccggcggggaattacatctcctatggcgtgcgtgaatttggtatgtcggccatcatgaacggtcttgcgctgcatggtgggtttatcccttacggcggtactttcctgatgtttatggaatatgcgcgtaatgcactgcgtatggcggcgctgatgaagatccgctcggtgtttgtttatacccacgataccatcggcctgggcgaagacggcccgacacatcagcccgttgagcaactggcgtcgctgcgtctgacgccgaatatggaaacctggcgcggttgcgatcaggtggaagtggcggtggcctggcaacaggcgattgagcgcaaagatggcccaacgtcgttggtattaacgcgccaacctctggcgcaacagccgcgcaccgctgcacagttggcagagattgcgcgtggtggttatgtactgagtgattgtgacggtcagcctgagatgatcctcatttctgcgggttcagagattgagttagtggtcagcgccgcaaaagcgttaacggaagaagggcgtaaagttcgcgtggtttccctgccgtgtaccgagcgtttcgataatcaggatgcggcgtacaaagagtcggtattgccaaaagctgtacgcaaacgtctggcggtagaagccagcatcgccggattctgggaacgctacgtgggcctgaacggtaaagtgatcggcatgacgagctttggtgagtctgctccggcgaatgtgttgttcaaacactttggttttacgccggaaaatgtcctggcgcaggcgcgtgagctactgaacagctaaacctgcacaaggggtgaaaggatgaccttttaccccttgaaacgggagccaagaaactcttcacgggtgcggtatttctcgtaatgcgccttgtttttatacataaacaacagcaccagcatatcaataacgcccattgccggaacgcgagtggagtcgaaggcttcaaagaagattttatcgctgaccgcggtattgagttgatgggtggagagttttgataacggagatttaatatagttagtgatacaaacggatttggcaccgcgctctttcaccactttaaagatatcgaccattaagttggtgctgccagagttagaaataccaatcgccaggtcgcgtttccccatagaatatgccgcattaatttgcatttccgggctgacgtgaacaacggtttttaatccgagttggctgaatttataagcaccataaacggccagagggtttgaatttccagcagcaaaaaagaaaatagtatcgcaattagcaagtagtttgagaatggactcaagcacttcggcattaaaaaattgcgttgattgtattaaatcttcggcctgtttttttaataagaaggttgccaaagatgttatatcgctgaagtcggtattttcaggatagctattgtcaggattaatgacttcttttgctaatgcaatttttaaatggtaataaccctgataacctaatttcttacaggtgcgtacgatagtcgcttcactggcatggcttttttctgatagttcagtgacactatagttcacgacttcatgtgcgtggctaagaatatagtcagcgacctttttttccgcctgatgcagtgtagggtaattgctttgaatcagactttttacggttatgttattcataattagtaaatttcattctgacagaaagtgctgattataacatagttttcaggcgtggataggtgtgaaaaaaatgaaggtgtgcagtgaacgtaatgattaacagaccggttaattttcatgaattacgtcaactgcacaaaaataatttaaacgggtgctctaattaaagcaagacttatatttttatcattgtattgtcaattaaatacaaattgtgtcattaattgtgggtttcttaaatattctatgcaccactgacaggctttgcccataccatcggaacgagcggcaagaaataacttggtggcgtgtttatgttcgcgcattggctttttaagcaatttaccgctgttcaataacggcaatgccagatgatgtggaatataaccaataccgacgttttgttctattaaggcgattgccgtagcgaagtcaggaacaaaaatgggtttttgtccttccaacaaccaggcttgcatcggggggaagttaacggaggtatcgcggatacaaaccgctggatagtgacgcaattcactgttttctaatggatgccgcttcgctgccagtgggtggagtgggctgacgacaaaatcccattccatttgtccgaccggttcgctaatgatgccttcactgcttggtactgcatgaggagcaccgtagaccagatcagcacgcttactgtacagcgcatcccagcagccgttgtatacctcaagatctaccgtcagtgttgttgatgtgaattgccgttcaaaatctcgaataaatgccaccagcaaatcaccaggaataatattgtttaccgcaattgtcagttcacgctcaataccatcgtgaatcagcactgtgttgcgctttaatgcttccaggtcgccaagaatagttttgctatgttcgatgaagtaacttcccgctggcgataattcaatatagcgtcccttacgaatgaacagttcaacgcccaggctctcttccgctttcttgatagtgtaactgatggcggaagggactttatttaactgctcggctgcggtggtaatgctctggtgtctggcgaccagatgaataacacgaagcgtttcgtctgagatgaacataaggctccctggtcagtggtaaagtggctgaatctctccagattcagccgtaatcattgcctgagtatacccaggaattagcggtgttgacttgcccgactgagaatcgcatacgcgatacatgccaccagaatcgagtctaccgaagggatcgtcgtcagggtgaataagccttttacggtcataaagccaaccgctgcgcctatgatccatgctgcgaatgtcagcactttaatctgtgactcctgggctaacactgactcttgatagccattacggcgataaaggaaaaagtcagcgatataaattccggcaacgggtggcgtggcgatacccaggaacagcagaaacggaataaaccacgccataatatccatactgcctacgatggcggaaaggatacccagcgccacggtaatctgccatttgggaaagcgggtaagcagtgtggaaaccaccagcgtgccctggaacatattgcccgcgttaccggtgacgcaggcgaaaatcaacaacagcgccgcaggcagaaccgcaccgaataccgccatcgcacccagtaaagatccctgaccactaatggcgctcggcgttgcacccgcccagtagagcagagggtaggcaaccagaaacgtcacgcctgcggcaatcagcgcatgtttgcggttatgcacaaaactaccgaaatcaggcagtgtggcaaccagcacaataatggtgccaacaacggtggaaacggcgacacctgtattcatctccacaatcgccgctggtactgccacttcggtatgggttgccacatagaggatgtaacacagcaccagcgcgataaccggcacggcaacttgggcaatttttcccagaacggtaaagccaaatgccgtagaggcgacaaaaatgacacagccagccgccactaacagtgccagtggaacttccagtccatgttgagccagtaagtcatgtaccgaatgaccaaacatattggcggtaacggcaatccagccgaacagacttatcgccatcaaaatgttaatggcgatggcccctttttcgccaaacgaatatttcacaatgccatacgttggcaggcgggctttttctcccacgctaatggtgatggctgaaagtaaggtcagaatgacgccgcctaacaatacgacgctaattaaactgctgctggaaagttgattgccgaggcttgaggatgacaacagtacaggtgtgacggcaatacccagcaaaatcatggcaatacgcaatcctgatgccgtattcagattctcttcttttttacgcatagtatgttccctttataaatgcgcgttacacagtatgaaaatgcccggtgtatttgcgccagctacccagttctgtaatttcccgttggccttcggtcagccagttttctgccagtacgcccagcacttcgctaccatcggcaagtttgattttgccaattgccagcccagcgggttcgctcattaacagagcggcaaaactggccagcggtaattgccaaatttctacgtcgacgtgtgttcctccttcattcacgcgaatcattcccggatggcgatcattaatactccacaaccggtaatgggcgtcagttcggtcttcacggacaaaaataccgcccgctttttgcatatttgggttgagttccaggccgcgcatcagcgttccgttaacggctaaaagcgttgtagtcattgtgttctccagagaattaaagggttatccatgtaccgctctgatgcgccagggctgcttttatggtttgcggtgaagtaatcaggccgctggcctgtttgccttgttgctggctggcattgatgaaatcaacaatggcttccactttgggttgcatactgccgacaccaaactgaccttcccgcaacagcgtttgcgcttcggcaacgctgatagcgtcgagccactgttgttgtggtgtaccaaagttaatcgctactttttctacaccggtggggatcaccagcagatctgcgcctaactgactggcgagcagcgcggaggccagatctttatcgatcacggcttccacacctttcagttgttgcccgtctcgcaccaccggaataccgccgccgccgcaggcaataaccagatatccctggcgcaccaggtgagcgatggtgtcgtgctcaataatttccagtggtgcaggagagggaactgtacgccgccaaccacgcccggcgtcctccatcagcgtccagccgagttgttgttggcgttgttgggccgttgcttcatcgagaaacgcgccaattggtttactggggctggcgaaagcatcgtcatgtgggctgactcgcgtttgtgtcaccagggcaattaccggtttgtttatgccacggcgagccaattcgttatgcagcgctttctggaacatgtagccaattgcaccttgtgtatcacccacggcgtaatcaagtggaaccggagaaacttcgttactggcgagttcagagcggcgcagaataaagcccacctgcgggccattaccgtgggttagtaccaggtcccatccggcttcaaccatatcaacgatatgctgcacgctttccatcactgcaacatattgatcgggaatactattgcgttgctcgtcctgaatgagcgcattgccgccaaccgcgacgacagccagtggcttaaccatgatggttctcctttgcgacgatctccgccagtgcacgtacagcggcgacaaaacaggccatcggcgcagtggtgatcccggcaccaatttgcccgacccccgcttgtttgtgggcgatacccgtattgatgaccggtaaaatgccgcgatcggtcactttacgcgcatcaatccctgctgcggtgggggcaaaattgagggctggaagtgtaaatgcggggttaccgccgagggtgatggcttgcatccgacggctgttattggtggcatcgacaggggtgcctcccacaaatttgacgatcgccggagacgacgccatcgcgaagccacccacacctgcggtttcagtaattgcgctatcacccaggtcagcagcagcatcgtcaacgccaaatccggggaagaacagaccttcaacggcattggcaggagcctggaaccagcgatcgccagtaccggaaagccgaataccaaaattcaccccgttacgcgccatcaccgtaaccattgaactgaacggtacattggcggcggcatccatcattgctttacaggcagccatcgacagattgaggaagaagtgatcgttaccggtgataaatgccacgacgcgctggatatgttcctgtggaagagagcaggctagcaatgccgggagcaggcgcttaatcagcaaaccggtagcggcagcattgcggttatgaacttcatcccccatatgcagcgcctgcgccattaatggcttgagttccagctcgccgtgttgtgcgattgctgctttcattgctggagccagttcatcgcgcatccaggccagacgattgagaacttcatcgttattggcgccaaaacggagaaccttacccagaccttcattgaaattgctaaaagtacggtggccgttggttttgttttctaccacccataacggcatcgacgggctgatgatgcctgccattgggccaaccgcgtgataatgatgacaaggggcaaggtcgatttcgcctgcgtttatttggttttcagcgtcttgctggctggtggcccaaccttcgtacagcatggcaccaataatcgccccttttaccggaccacacatctcttcccaggcaatcggcgggccagagtgcaaaatacgtttttgttcagccattgctggaatggcctctttagcgagcatgacatccaccagcacgggctgtgcttcgagataacgtgccatggcgatttggttggcattttctaccaggggatgacatagcaacgatgccagatccaatccagcgtcaatatcgccttgtgctggtggctgccagttgagtgcaattgcgcttcccccggcatgttgaatattgtcagcaaaactgtgtagtcccgcgttcacgaccttcaaaggctgattaaataaggtattcatacgtttagcccctttttctgcaactgagtctgtgcaacggtgctggcccatagcgccgcctgtgcattgctgctggcgatgatgacgcccgcattttgtagtgcgcttatctgctgactgcgtatttgcggatcagcttccgttccgcaaacgtgcgcaatcagcaacggtgcgttattcatgtcgatgtgtgaaagttggtccagtaattcgctggcaggcgtcgtggaagcgccataaccaagtaccaggtcgaataacacgacggcagtgtgtgagtcgttgagttcgttgagcagacgttgattgcgcagagtcgggtcgatcattggatgcggtttgccacgggtgaaatcatcgtcgcccatatcgatcaacgtgtgatcttcgctttgccagatatttgccagagcacgattacccgcaactggcgtattggaagctgcgctgaatcccttttgttggcagataagttgcgcttcgtagcagaaggttcctccggcgaaaacaccgcgtatcgcctggcgatgggctggcagacgctggcaggcgttttgtaacattgtgagatcgtcgcaggaaatctcggtctcgacagccggaagtggttgatcattcagtaacgccacggcgatgttggcggcgctggcaagtgtggtggccgcggtgatattgggacgtgccagatcatgcggattcgcaccgaggaaattcaccactacgggttttccacaagcctcggcacgctccagaatagtccgggcaacgatcggtgaaggcggttttgatataagcacaatcacgcgagtttcatcgtcttgcgccagcgcatctaaagcgaagagcatcgatattccaccaatctcttcactgagatcatgtccgcctgttcccaacgcctgagaaatacccgctccgagctggtcgattcggcaagtcacttcctgtagcccggtgcctgacgcgccaataacaccaattgctccgcgtttcaccacattagcgaagcctaacggaatgccgttaacaatggcggttccacagtcaggtcccattacgatgcgctgacgttctcgggcaagcgttttgatggatttttcctgcccgatactgacgttatcgctgaacatcatcacgttcattccgaggtttaacgctttcattgcttcggcggcggcgtagtctcccggtacagaaatgagtgccaggttggcttcgggttcggcttccagtgccatttccaggctgaccttttccggtgttttaatgccactatccgtttcatcatcgggtttgctggtcagacgttgctgggccagtaccagtgcttcattgcaaatatcttcttcacccatgactgcaatcactaaatcattgggactggcgttgatttcgttacccagacccgcatcgcgcaattgttcgagattattgggcgttcccatgacgaccgaggcctgttgaataccgggcaacttgctgatttgcgcggaaatctgcatcagagaaactgagtcctgataaagattactgaaaactttatatttaactttcatgctgttacgcctgtttcattccgcccgatagcaaaattcgggcaaagcatccccgtgtagccccataaacgggctacgggagaaaaggttgaaatcaattcatggtgttcagggttcgaaagccatgcagcattcctgcaaggcaatctactcctgacgttgcgccaaattgcatgacctgttctgcacaggatgcgattgtcattgccgatgcgctcccaaccagttgtgcgagtaactggcaaatcggttctgaaaaatgtccctgaagcgcacgctccagataatgacgactgatatccgtggtgttgtgcgcatgttgatcaattgcctgctgcaaccggtattgatgatcggcaagtggtgcagggagttgccataaccagagcgctgccagatagcccaacaaatagtcatctccatcgggtgttaagcctttaccaaagccgatcagttgtggcacctggcgttccagcgcatctggatgttccataatcgctaatccctggtgcgtgaggctatccggcaggtgcaatgtgctttgaacgttatgttccagacaaaataaaagccgttgcgatgccatcgttgggtagtgctggaaaaccaaagggaatgcctcaagtgtcagcattctccccacaaatggcgactgccagagcgttgcgttttcgagcgccacacaaaatcgaggtgtccgcagtaagccttgggttaactgaatgggatctgaatgggcaatctctcttcgccagtcccaacattcaggtagccagactctggcagcatcagggagattcagatacgtttgcgcacacaacagagtgatgaatgttcccgcgtctgaatacagatttaccgcatgtttaaaagcgctatgcagacgtaaatcttgcgtttcattctgcgggaaaagatatcccaacgacgatgcgcaaagcgtaacctgtaccatcggcgttagccttccagacctgcaataatggctttggaatcagtaacccaaccgaaaatggcaccttgtgctttgatcatctcaagggcgtatttctggaattccgggaaataggagccgacacaatcttccgggataatgcattcatagccacgatcatttgcttcgcgcacggtggtggttacgcaaacttcggttgtaacaccacaaactatcagcgtcttgataccgtggttttgcaaaatcagatgtaagtcggtttgataaaacgcgcctttgccaggcttatcaatcaccggttcgcctgccaccgggtacagttcaggaatgatgtcatgacctgcttcacctctgaccagaatgcgtcccatcggtcctggttcaccaataaaggtttttccgccgcgcgtcagtttggctggcgggcagtcgcttaagtctgcacgatggccttcacgagtatgaataaccataattcctttttgacgtgcggctgccagcacctctgtacatggtgcgatagccgtgcgtaccagtgaaacatcattgcccagtgcctcaccgaagccccctgcttcgacaaagtcacgctgcatgtcgatcatgaccagtgcagttgtgcgcggatcaaaaggtaattcaaagggttgagcctgaaaaatggattgcgtcatggtaaatctcctgtctgatgtttaaacgatccagttgttctgagaacgagtattcaggagaaaagcggcacaaaacaggaaaaaagtttgccgcacagcaacgaaatttttgcattcagcaggtggtgtgatgacgaatgtgaagggagtcaaagagtggcatacagcaacaaattttttgatgctgtatggttttgagattaaaaaaatcgttgaaattgtgtgagcttaatcatcagatttagcgactatggcgttactttttaacaccatactgtgtaaaccattccaacattcgctgccagccgtctttcgcagattcggcatgatagctcgggcgataatcggcgttgaacgcatgccctgcatccgggtacacgataatctctgctttcgcgtttgctgcccgcagcgcctggcgcatcgtttccacgctctcttgcggaatgctgttatcctggccgccatataagccgagaaccggcgcgttaagatcggttgcgatatcaacaggttgtttcggtgaattcagcgacttatcgcccgtcagtttgccgtaccacgccactgcggcttttagctgtggattatgcgcggcatacagccaggtgatacgtccaccccagcagaatccggtgatcattaaacgatgaacatcgccgccgttgcgggaagcccaactggcgacatgatcgagatcggccagcacctgcgagtcaggcacttttgctaccagaccgctaagcaacgtggggatatcggcaaaatcattcggatcgccttcgcggaagtaaagttcaggtgcgatagccagatacccctccagcgccagacggcgacaaatgtcgcggatatgttcatgcacgccaaaaatttcctgcactacaatgaccactggcagtgggccatcgctttgctttggtctggcatggtaagcaggcatgttatccccttgtgaagggatagaggtgaagcccgccacaatcgcgtcgtccggagtctgaacgatggtcgaagcgagaggcgatgcagcaggtgcaaatccagattgttgtgttgttgccatggtattctccgtacccttataaaaatgttgcgcaatgttaactatagtcagcatgcaacaaatcacattgcctgaatcggctcatcttttatgcagtcctgcagaatgaagagtgatttatgtgatttgcatcacttttggtgggtaaatttatgcaacgcattttcgtcatggtgatgagtatcacgaaaaaatgttaaacccttcggtaaagtgtctttttgcttcttctgactaaaccgattcacagaggagttgtatatgtccaagtctgatgtttttcatctcggcctcactaaaaacgatttacaaggggctacgcttgccatcgtccctggcgacccggatcgtgtggaaaagatcgccgcgctgatggataagccggttaagctggcatctcaccgcgaattcaccacctggcgtgcagagctggatggtaaacctgttatcgtctgctctaccggtatcggcggcccgtctacctctattgctgttgaagagctggcacagctgggcattcgcaccttcctgcgtatcggtacaacgggcgctattcagccgcatattaatgtgggtgatgtcctggttaccacggcgtctgttcgtctggatggcgcgagcctgcacttcgcaccgctggaattcccggctgtcgctgatttcgaatgtacgactgcgctggttgaagctgcgaaatccattggcgcgacggctcacgttggcgtgacagcttcttctgataccttctacccaggtcaggaacgttacgatacttactctggtcgcgtagttcgtcactttaaaggttctatggaagagtggcaggcgatgggcgtaatgaactatgaaatggaatctgcaaccctgctgaccatgtgtgcaagtcagggcctgcgtgccggtatggtagcgggggttatcgttaaccgcacccagcaagagatcccgaatgctgagacgatgaaacaaaccgaaagccatgcggtgaaaatcgtggtggaagcggcgcgtcgtctgctgaaataaaaaaacgctccccaacttcggggagcgatatcagttattgacgccgtaaacgcattattttgcggattattggcgtcagtagcgtaaaggctgccagagtcagcaatgccagagtgatcggtcgggtatacagaaagtcgagtgaaccccctgaaagcgacagcgcacggcgaaaattactttccgccattggccccataatcaatgccaggaccactggcgacgccggatatccccctttctgcatgaaatagcccactacgcccgcaatcaacataatgccgacatcaaacaggctgttgttcagtgcataagtcccgaccacacaaagtgcgaggatcatcggtgtgagaatattgccgggaattttcaccacattaccgatgactttcaaagagagcagtccaagaactagtagcatgaagtaacagaagatcatgccgacaaacagcgtataaaccatatcaccgtggtcggtaaacatcagcgggcctggttgcattccctgtaacgttaacgcgcccagcatgatggcggttaccgcatcgccagggatccccagcgtcagcataggtaacaatgcgccaccggtgcagccattcgcgcctgcctcacaggaggccacagctttaatttcacccttaccaaagttttctggtgtcttactgaaacgacgagtttcgttataggcaacaaaagctgcaatatccgcccccgcaccggggatcatgccgataaaaacccctaatcctgatgagcgcaaaatggttaatgcgatgcggcgtagtgtttgccagggcagtaacagactgccgatagccaccttcgcgccccgacgaatttgctggttttgctccatagagcggaatgcttctgaagcagcaaataaaccaatcatcaccgggataaatggcacattcatcagctccacaaatccacctgtaaaccgtggaaaaccgcccattggatcaaggcctatcgttgcgatcagcaatccgccaaccccggcaatcagccccttaatcagcgactcaccggaaatactggcaataatgctcagtccgaaggttgccagggcgaaggactccgaggcactaaatttcagcgcccaactggcaagtaccggagagagaaacatcagcacgataatgctgagcgttccgccactaaaggaagagaacgtggcggcactcaatgccagccctgcttttccctgtttcgtcagctcataaccatcaatagcggtggctgcggcggcaggcgttccgggaattttgagcaaaattgcggtgatagaaccaccgtagacgccaccaaaaaagacgccgcaaatcatcaacaatccagaaacaggctccatgccgtaggtgaaaggcagcaaaatcgccacacccatggtcgctgtcagaccaggcaaagcgccaatcacaatacccagcatcaccccaaaagtggcaaacagcagcgcctgaggattattgagtaatgtcgaaaaaccctgagttaaaagttcactttcaaacattgctggcccctgttattcgaaaaatgtgccgacaggcaatggcacctgtaacgcttcgacaaacagcaaccagaggattgccgttaacagcagcgcaatacccggtgtgagtacccatcgcctgtagcccatcaacgtcataatgacgatgaggaaaacaggagtagtaatgagataaccgcagtagctcatcgccacaatataaaacgcggttgccgcaattcctgttgctgttttcctgaatgccggtttttcctgtgcgttggcgcaagaggctggttttgcctgcaaaagatcgcgtatcaccagcaagacagcgagcacaatcagggcacaggcatagaaggtagggaaggcacttgcaccgggatccgtttcaatggcagttgctggaaaatcagcggcattaatcatcaccgcgccagcaaccacacaaagtaacagcgccaccaccatcgttgatgaaaggcgcttgcggtgcggtacggcgagttgagcaacagactgttttgtgttcatcaaccgtacctcaggtttattttttcaggcccaggcgagtcagcaactcgtcaaagtacttttcctgttcgctgatttgggtctggaagctggcagcgtcaagccatgcatagttgagattcaacttttgcagtgcatcctggaatgcaggctcttcagccgtctcttttgctgcctttgccagaacatccaccacatcctgcggcgttttttgcgacacaatcaggccgcgccaggtgccgatggagagatcaacgcctttctcttttaacgtcgggacgtcaggcatggttttcattcgctcatccgccatcactaccagtgtcttcagcttgccgccattcacatggttgataacttctcctgggcttacggaaaccgcttcaatatgcccgcctaacaggcctgtaatggcaggggctgcgccgtcatacgggacatgagaaaactttgtgcccgttttgtcttccagtgcagctgccgccagatgccagatagctccggtgcctgagttaccaatgcgtacttttccgggattcgctttggagtaagccataaattcttcatagctattccacggcgcatcggcacggactgtgatagcagccggatccgcattcagacgggcaatgggtttaaagtcgctggttttaaaacgcaccattccgaggctgggaagggtggtcagttcaaccgtgcctaaaccaattttgtaaccgttagggcgggcagcggcgatttcactcaggccgatagcaccgcctccgccaggtttattgataaccccgatgctgacgggtaaatggtttttggcggcatcagcaaaggcacgggcaaccagatccgtaccgcctccggcagcgtagggaacgactaactcgatctgtttggttgggtaggaggctgcctgtacaggcgcaatgctgagggcagcgcctgcaagaagtaccattgcagccatttttttcggtaaggtaagatgttttatcattgcttttatatccttatttatcagttagttgctatttaaattgttccatgcgttcataaacagtactgcattttcatagacttgctctggcgtcatgccggggcgatatagcgcagaaccgaggccaaagccgtttgcgccgtggctcagataacgcgccatggtttccggtgtgataccgccaaccggtaacatcggaacggattgtggaataaccgcacgccaggctttggtaacttctggcgtaatttgttcagccgggaacagcttgatggcattagcaccatgttcaatggcagcaaaggcttcggtgggcgtggcgacgccaggcgcacaatacatacccagcgcacgggcgcgacggatcaccgcagtatcgcaatgcggcatcacgataatctggcccccagcctctttaaccgcaaccacctgctctaccgaaagcacagttccggctccgaccaggcagtccttaggcagggcgtcgcgcagtatactgatactttgcaacgcctccggcgagttcataggaatctcaatcaggcggaatccggcggcgtacagtttttcaccgatggcgacaatctcatccggtttcacgccgcgtaaaatggcgactaacccggttttttgcaaaagcgtattaaatggcatgggtacattccctggcgttggtggacagtaacccggcagcgtgggcgattcgccataatccctgttcagtggcattaggaatggcgtgtatctgtctgccgggaaaaacgtggctgaatgcttgtgaatagcggctgttcagatttgcgctaccgattaaggcgatcggtgttgtggcgggtaaatcacgtagcaaactggatgccagaccacataattcatggcctatcagtaatccggaaaggtaatccccctgcgaggacgacgtaagattactggtcagcaggcgcgaacgggtcgaaaacagcgtcgataataatccggtctgatgatgctcttgtgctgctgtcagcccgtgggtgaaggcatcccagtgcggttcatctccaggatgcatggtggcaccgagaatcgaatggcgggataaaacatcaaataactcgcccgtcataaaggttcggaaatcggtaatggtgttgttttcaactactgcccatttcgcatgtgtgccgggtaagcctatcagcactggcataccctgatggatcgcgttttgcagggccggttccatcgagatagcaccgaagatttgtgtttcttcgccacgcatcacttcgggcatttcaccttctttaatcacgccaggaatgatatgcagcattgtctgctgctggtggataacaggcgtcaactgcttcgccagaccctcgagagtgaccgggcaaggtaaataagctgctgattgccacccttgcgcactgccgagcatgccgcaagccagtaccgggcatggggtttgtgccagccagtcgccgcagacacgtaaaaacgtatcgtggaaagcgtcctcacgtgttgctgcctgggagggtaatttcatgatcccccaggggaattcacgtttttcttgtggatttggtgattcgccaaaacgccatgcccgaagcgatgacgttccccagtccagggcaataaatgagggtgctcccggcattagtcgtttcctttaatcatggtttatttatctttgcggacgtgcttaccccagcccagttcagcggatatctcttctgcacaggatttgacgtaaggtgccagttcttccagacgcgccagcgacatatacgtggtggtactggcgacagaaatagccgccacaatttcatcccgggcgttgtaaaccggcgctgcaacgcaacggatagtcggctcgttctcttccagatcaaaagcaaaaccactggcggcataacgacgcatgttctgaataaatgtgcccagttttgtttcatcaccacaggtcttaaacagcgtgcgccactcttcttctgttcggttgaggatcaatgccttgccgatgccggtgattgccagtggcatgcgatggcctgggcgtgagcgcatttccagcccgcgctgactgttgatcttctccagatacagcacttcgtcgccttcaacgatccccagatgcacggtgtccagggtgtaacgggcaaggcgttgcaaaacgggctgggcaatttcgtacagcgaggtgctttccagtgctctggcaccaaattcgatcagtttggcacccagttggtagccctgcgttgggacatggcgcagatagcgttgttccaccagaacggtgactaaacgatgggttgtgctccgggtcgtgccggtgaactcgccgatactttttaggtcatggcagccgttataaacagcattaagaaccgccagtccacgtaataacgtttgtgcgcctgcggtggttgaagaggtttctgccatacgtttctcctgatgatattgctgaagtgttccacataatgacgtggggaaaaggtgatatatcccacaatataaactccatctcatattgtgggataaaataatgaaaattaacgatcgttttgcgtagcgcctcgcaggaaacttctttcaaactggacgtttgtacagcacaattctattttgtgcgggtaagttgttgcgtcaggaggcgttgtggatttctcaatcatggtttacgcagttattgcattggtgggtgtggcaattggctggctgtttgccagttatcaacatgcgcagcaaaaagccgagcaattagctgaacgtgaagagatggtcgcggagttaagcgcggcaaaacaacaaattacccaaagcgagcactggcgcgcagagtgtgaattgctcaataacgaagtgcgcagcctgcaaagtattaacacctcgctggaggccgatctgcgtgaagtgaccacgcggatggaagccgcacagcaacacgctgacgataaaattcgccagatgatcaacagcgaacagcgcctcagtgagcaatttgaaaaccttgccaaccgtatttttgaacacagtaatcgtcgggttgatgagcaaaatcgccagagtctgaacagtcttttgtcgccgttgcgtgaacaactggatggtttccgccgtcaggtccaggacagctttggtaaagaagcccaagaacgtcataccctgactcacgaaatccgcaacctccagcaactcaacgcccagatggcccaggaagcgatcaacctgacgcgtgcgctgaaaggcgacaataaaacccagggcaactggggcgaggtagtattgacgcgggtgctggaggcttccggtctgcgtgaagggtatgaatatgaaacccaggtcagcatcgaaaatgacgcccgctcgcggatgcagccggatgtcatcgtgcggttgccgcagggaaaagatgtggtgatcgacgccaaaatgacgctggtcgcctatgaacgctatttcaacgccgaagatgactacacccgcgaaagcgcgctacaggaacatatcgcgtcggtacgtaaccatatccgtttgctgggacgcaaagattatcaacagctgccggggctgcgaactctggattacgtgctgatgtttattcccgttgaacccgcttttttactggcgcttgaccgtcagccggagctgatcaccgaagcgttgaaaaacaatatcatgctggttagcccgactacgctgctggtggcgctgcgcactatcgccaacctgtggcgttatgagcatcaaagccgcaacgcccagcaaatcgccgatcgtgccagcaagctgtacgacaagatgcgtttgtttgtcgatgacatgtccgcgattggtcaaagtctcgacaaagcgcaggataactatcgccaggcaatgaaaaaactctcttcaggtcgcggaaatgtgctggcgcaggcagaagcgtttcgcggtttaggggtagaaattaaacgcgagattaatccggatttggctgaacaggcggtgagccaggatgaagagtatcgacttcggtcggttccggagcagccgaatgatgaagcttatcaacgcgatgatgaatataatcagcagtcgcgctagcccattgggggtagttaagccgggtagaaatctagggcatcgacgcccaatctgttacacttctggaacaattttttgatgagcaggcattgagatggtggataagtcacaagaaacgacgcactttggttttcagaccgtcgcgaaggaacaaaaagcggatatggtcgcccacgttttccattccgtggcatcaaaatacgatgtcatgaatgatttgatgtcattcggtattcatcgtttgtggaagcgattcacgattgattgcagcggcgtacgccgtgggcagaccgtgctggatctggctggtggcaccggcgacctgacagcgaaattctctcgcctggtcggagaaactggcaaagtggtccttgctgatatcaatgaatccatgctcaaaatgggccgcgagaagctgcgtaatatcggtgtgattggcaacgttgagtatgttcaggcgaacgctgaggcgctgccgttcccggataacacctttgattgcatcaccatttcgtttggtctgcgtaacgtcaccgacaaagataaagcactgcgttcaatgtatcgcgtgctgaaacccggcggccgcctgctggtacttgagttctcgaagccaattatcgagccgctgagcaaagcctatgatgcatactccttccatgtgctgccgcgtattggctcactggtcgcgaacgacgccgacagctaccgttatctggcagaatccatccgtatgcatcccgatcaggataccctgaaaaccatgatgcaggatgccggattcgaaagtgtcgactactacaatctgacggcaggggttgtggcgctgcatcgtggttataagttctgacaggagaccggaaatgccttttaaacctttagtgacggcaggaattgaaagtctgctcaacaccttcctgtatcgctcacccgcgctgaaaacggcccgctcgcgtctgttgggcaaagtgctgcgcgtggaggtaaaaggcttttcgacgtcattgattctggtgttcagcgaacgccaggtcgatgtactgggcgaatgggcaggcgatgctgactgcaccgttatcgcttacgccagcgtgttgccgaaacttcgcgatcgccagcagcttgccgcactgattcgcagtggtgagctggaagtgcagggtgatattcaggtggtgcaaaacttcgttgcgctggcagatctggcagagttcgaccctgcggaactgctggccccttataccggtgatatcgccgctgaaggtatcagcaaagccctgcgcggaggcgcaaagttcctgcatcacggcattaagcgccagcaatgttatgtggcggaagccattactgaagagtggcgtatggcacccggtccgcttgaagtggcctggtttgcggaagagacggctgccgtcgagcgtgctgttgatgccctgaccaaacggctggaaaaactggaggctaaatgacgccaggtgaagtacggcgcctatatttcatcattcgcacttttttaagctacggacttgatgaactgatccccaaaatgcgtatcaccctgccgctacggctatggcgatactcattattctggatgccaaatcggcataaagacaaacctttaggtgagcgactacgactggccctgcaagaactgggaccggtatggatcaagttcgggcagatgttatcaacccgccgcgatctttttccgccgcatattgccgatcagctggcgttattgcaggacaaagtcgctccgtttgatggcaagctggcgaagcagcagattgaagctgcaatgggcggcttgccggtagaagcgtggtttgacgattttgaaatcaagccgctggcttctgcttctatcgcccaggttcataccgcgcgattgaaatcgaatggtaaagaggtggtgattaaagttatccgcccggatattttgccggtcattaaagcggatctgaaacttatctaccgtctggctcgctgggtgccgcgtttgctgccggatggtcgccgtctgcgcccaaccgaagtggtgcgcgagtacgaaaagaccttgattgatgaactgaatttgctgcgggaatctgccaacgccattcagcttcgacgcaattttgaagacagcccgatgctctacatcccggaagtttaccctgactattgtagtgaagggatgatggtgatggagcgtatttacggcattccggtgtctgatgttgcgacgctggagaaaaacggcaccaacatgaaattgctggcggaacgcggcgtgcaggtgttcttcactcaggtctttcgcgacagctttttccatgctgatatgcaccctggcaacatcttcgtaagctatgaacacccggaaaacccgaaatatatcggcattgattgcgggattgttggctcgctaaacaaagaagataaacgctatctggcggaaaactttatcgccttctttaatcgcgactatcgcaaagtggcagagctacacgtcgattctggttgggtgccaccagataccaacgttgaagagttcgaatttgccattcgtacggtctgtgaacctatctttgagaaaccgctggccgaaatttcgtttggacatgtactgttaaatctgtttaatacggcgcgtcgcttcaatatggaagtgcagccgcaactggtgttactccagaaaaccctgctctacgtcgaaggggtaggacgccagctttatccgcaactcgatttatggaaaacggcgaagcctttcctggagtcgtggattaaagatcaggtcggtattcctgcgctggtgagagcatttaaagaaaaagcgccgttctgggtcgaaaaaatgccagaactgcccgaactggtttacgacagtttgcgccagggcaagtatttacagcatagtgttgataagattgcccgcgagcttcagtcaaatcatgtacgtcagggacaatcgcgttattttctcggaattggcgctacgttagtattaagtggcacattcttgttggtcagccgacctgaatgggggttgatgcccggctggttaatggcaggtggtctgatcgcctggtttgtcggttggcgcaaaacacgctgattttttcatcgctcaaggcgggccgtgtaacgtataatgcggctttgtttaatcatcatctaccacagaggaacatgtatgggtggtatcagtatttggcagttattgattattgccgtcatcgttgtactgctttttggcaccaaaaagctcggctccatcggttccgatcttggtgcgtcgatcaaaggctttaaaaaagcaatgagcgatgatgaaccaaagcaggataaaaccagccaggatgctgattttactgcgaaaactatcgccgataagcaggcggatacgaatcaggaacaggctaaaacagaagacgcgaagcgccacgataaagagcaggtgtaatctgtgtttgatatcggttttagcgaactgctattggtgttcatcatcggcctcgtcgttctggggccgcaacgactgcctgtggcggtaaaaacggtagcgggctggattcgcgcgttgcgttcactggcgacaacggtgcagaacgaactgacccaggagttaaaactccaggagtttcaggacagtctgaaaaaggttgaaaaggcgagcctcactaacctgacgcccgaactgaaagcgtcgatggatgaattacgccaggctgcggagtcgatgaagcgttcctacgttgcaaacgatcctgaaaaggcgagcgatgaagcgcacaccatccataacccggtggtgaaagacaatgaaactgcgcatgaaggcgtaacgcctgctgctgcacaaacgcaggccagttcgccggaacagaagccagaaactacgccagagccggtggtaaaacctgctgcggacgctgaaccgaaaaccgctgcaccttccccttcgtcgagtgataaaccgtaaacatgtctgtagaagatactcaaccgcttatcacgcatctgattgagctgcgtaagcgtctgctgaactgcattatctcggtgatcgtgatattcctgtgtctggtctatttcgccaatgacatctatcacctggtatccgcgccattgatcaagcagttgccgcaaggttcaacgatgatcgccaccgacgtggcctcgccgttctttacgccgatcaagctgacctttatggtgtcgctgattctgtcagcgccggtgattctctatcaggtgtgggcgtttatcgccccagcgctgtataagcatgaacgtcgcctggtggtgccgctgctggtttccagctctctgctgttttatatcggcatggcgttcgcctactttgtggtctttccgctggcatttggcttccttgccaataccgcgccggaaggggtacaggtatccaccgacatcgcgagctatttaagcttcgttatggcgctgtttatggcgtttggtgtctcctttgaagtgccggtggcaattgtgctgctgtgctggatggggattacctcgccagaagacttacgcaaaaaacgcccgtatgtgctggttggtgcattcgttgtcgggatgttgctgacgccgccggatgtcttctcgcaaacgctgttggcgatccctatgtactgcctgtttgaaatcggtgtcttcttctcacgcttttacgttggtaaagggcgaaaccgggaagaggaaaacgacgctgaagcagaaagcgaaaaaactgaagaataaattcaaccgcccgtcagggcggttgtcatatggagtacaggatgtttgatatcggcgttaatttgaccagctcgcaatttgcgaaagaccgtgatgatgttgtagcgcgcgcttttgacgcgggagttaatgggctactcatcaccggtaccaatctgcgtgaaagccagcaggcgcaaaagctggcgcgtcagtattcgtcctgttggtcaacggcgggcgtacatcctcacgacagcagccagtggcaagctgtgactgaagaagcgattattgagctggccgcgcagccagaagtggtggcgattggtgaatgtggtctcgactttaaccgcaacttttcgacgccggaagagcaggaactcgcttttgttgcccagctacgcattgccgcagaattaaacatgccggtatttatgcactgtcgcgatgcccacgagcggtttatgacattgctggagccgtggctggataaactgcctggtgcggttcttcattgctttaccggcacacgcgaagagatgcaggcgtgcgtggcgcgtggaatttatatcggcattaccggttgggtttgcgatgaacgacgcgggctggagctgcggaaattgttgccgttgattccggcggagaaattgctgatcgaaactgatgcgccgtatctgctccctcgcgatctcacgccaaagccatcatcccggcgcaacgagccagcccatctgccccatattttgcaacgtattgcgcactggcgtggagaagatgccgcatggctggctgccaccacggatgccaatgtcaaaacactgtttgggattgcgttttagagtttgcggaactcggtgttcttcacactgtgcttaatctctttattaataagattaagcaatagcatggagcgagcctcgccatcgggctcggtgaaaatggcctgaaaaccttcgaatgcgccttcagtaataatcactttatcaccaggatacggcgtcgatggatcgacaatatctttcggtttatacactgataactgatgaatcaccgccgatgggactatcgctggcgacgcgccaaagcgcacgaagtggctgacaccacgggtcgcgttgatagtcgtggtatgaatcacttccggatcgaactccacaaacaagtagttggggaacaatggctcactgactgcagtacgtttgccacgcacgattttttccagggtgatcatcggtgccaggcaattcacagcctgtctttcgaggtgttcctgggcacgttgaagttgcccgcgcttgcagtacagtaaataccaggattgcataatgactcttatccgtttaatcggggcgcaaggatagcaaaagctttacgctaagttaattatattccccggtttgcgttataccgtcagagttcacgctaatttaacaaatttacagcatcgcaaagatgaacgccgtataatgggcgcagattaagaggctacaatggacgccatgaaatataacgatttacgcgacttcttgacgctgcttgaacagcagggtgagctaaaacgtatcacgctcccggtggatccgcacctggaaatcactgaaattgctgaccgcactttgcgtgccggtgggcctgcgctgttgttcgaaaaccctaaaggctactcaatgccggtgctgtgcaacctgttcggtacgccaaagcgcgtggcgatgggcatggggcaggaagatgtttcggcgctgcgtgaagttggtaaattattggcgtttctgaaagagccggagccgccaaaaggtttccgcgacctgtttgataaactgccgcagtttaagcaagtattgaacatgccgacaaagcgactgcgtggtgcaccctgccaacaaaaaatcgtctctggcgatgacgtcgatctcaatcgcattcccattatgacctgctggccggaagatgccgcgccgctgattacctgggggctcaccgtaacgcgcggcccgcataaagagcggcagaatctgggcatttatcgccagcagctaattggtaaaaacaaactgattatgcgctggctgtcgcatcgcggcggcgcgttggattatcaggagtggtgtgcggcgcatccgggcgaacgtttcccggtttctgtggcgctgggtgccgatcctgccacgattctcggtgcagtcacccccgttccggatacgctttcagagtatgcgtttgccggattgctgcgcggtaccaagaccgaagtggtgaagtgtatctccaatgaccttgaagtgcccgccagtgcggagattgtgctggaagggtatatcgaacaaggcgaaactgcgccggaagggccgtatggcgaccacaccggttactataacgaagtcgatagttttccggtatttaccgtgacgcatattacccagcgtgaagatgcgatttatcattccacctataccgggcgtccgccagatgaacctgcggtactgggtgtagcactgaacgaagtgttcgtgccgattctgcaaaaacagttcccggaaattgtcgatttttatctgccgccggaaggctgttcttatcgtctggcggtagtgacgatcaaaaaacagtacgccggacacgcgaagcgcgtcatgatgggcgtctggtcgttcttacgccagtttatgtacactaaatttgtgatcgtttgcgatgatgacgtcaacgcccgcgactggaacgatgtgatttgggcgattaccacccgtatggacccggcgcgggatactgttctggtagaaaatacgcctattgattatctggattttgcctcgcctgtctccgggctgggttcaaaaatggggctggatgccacgaataaatggccgggtgaaacccagcgtgaatggggacgtcccatcaaaaaagatccagatgttgtcgcgcatattgacgccatttgggatgaactggctatttttaacaacggtaaaagcgcctgatgcgcgtttgttttgccctatttatcgatccgacagagaaagcgcatgacaaccttaagctgtaaagtgacctcggtagaagctatcacggataccgtatatcgtgtccgcatcgtgccagacgcggccttttcttttcgtgctggtcagtatttgatggtagtgatggatgagcgcgacaaacgtccgttctcaatggcttcgacgccagatgaaaaagggtttatcgagctgcatattggcgcttctgaaatcaacctttacgcgaaagcagtcatggaccgcatcctcaaagatcatcaaatcgtggtcgatattccccacggagaagcgtggctgcgcgatgatgaagagcgtccgatgattttgattgcgggcggcaccgggttctcttatgcccgctcgattttgctgacagcgttggcgcgtaacccaaaccgtgatatcaccatttactggggcgggcgtgaagagcagcatctgtatgatctctgcgagcttgaggcgctttcgttgaagcatcctggtctacaagtggtgccggtggttgaacaaccggaagcgggctggcgtgggcgtactggcaccgtgttaacggcggtattgcaggatcatggtacgctggcagagcatgatatctatattgccggacgttttgagatggcgaaaattgcccgtgacctgttttgcagcgagcgtaatgcgcgggaagatcgcctgtttggcgatgcgtttgcatttatctgagatataaaaaaacccgcccctgacaggcgggaagaacggcaactaaaactttattcagtggcatttagatctatgtcgcatccggcaattggtgcacgatgcctgatgcgacgctggcgcgtcttatcaggcctacattggtgccggatcggtagaccggataaggcgttcacgccgcatccggcaagtggttaaacccgctcaaacaccgtcgcaataccctgacccagaccgatacacatcgtcgccagaccaaactgaacgtctttgcgctccatcagattcagcagcgtggtgctgatacgcgcaccggaacaacccagcggatgacccagcgcgatcgcgccaccgttgaggttgatcttctcgtcaatctgctccattaacccgagatctttaatacacggcaggatctgcgcggcaaaggcttcgttcatctcgaatacgccgatatcgctggcagaaagccccgcttttttcagcgccagcttcgaggccggaaccggaccataacccataatcgatgggtcacaacccacaaccgccatcgaacgcacgcaggcgcgcggcttaagacctaagtcacgggcgcggctttcactcatcaccagcatggcagctgcgccatcggaaagcgcagaagatgtacccgccgttaccgtaccgctgacgggatcaaacgccggacgcagtgtggcgagggcttccacggtggtttccgggcgaatcacttcgtcgtaattaaactgcttcaatacgccgtcggcatcgtgaccaccggtcgggatgatttcatttttaaatgcgcctgactgcgtggcggcccaggcgcgggcgtgtgaccgtgcggcaaaggcatcctgcatttcacggctgataccgtgcatacgcgccagcatttctgccgttaagcccatcatgcccgccgctttggcgacattgcggctcaggccggggtgaaaatcgacgccgtgactcatcggcacatggcccatatgctccacgccgccaaccagacatgcctgcgcatcgccggtcatgatcattcgtgccgcgtcatgcagtgcctgcatggatgaaccacacaagcgattgacggtcaccgccgggacagagtgcggcacttctgccaacagcgccgcgttacgggcgatattaaaaccctgctccagcgtttgctgcacacaaccccagtaaatatcgtcgagggccgctgcttccagcgccgggttacgcgccagcaggctacgcattaaatgagcggagagatcttccgcacgcacgttacgaaaagcaccgcccttcgaacggcccatcggggtgcgaattgcatcgacaatgacaacctgttccattgtgactccttaagccgttttcaggtcgccaaccggacgggctggctcaaccgggggatagtacggttcgttatgacgtgctttattacgcagaccttccggtacttcatacagcgggccgaggtgctgatattgctgtgccatatcgaggtattttgcgctgccgagggtgtccaaccagcggaacgcgccgccgtggaacggagggaagcccaggccgtagaccagcgccatatccgcttctgccggagtggcgataatgccctcttccagacagcggaccacttcgttgaccatcgggatcatcatgcgggcgataatctcttcctcgctgaaatcgcgcttcggctggctcacttttgccagcaggtcgtcaacgacgacatcttcttctttcttcggcttacctttgctgtcttctttataacgccagaaaccgaggccgttcttctgaccaaagcggttggcattaaacagcgcgtcgatggcatcgcgataatctttctgcatccgctgcgggaagcctgctgccatgacagtctgggcgtgatgcgcggtgtcaatgcccacaacatccagcagatatgccggacccatcggccagccaaactgtttttccatcactttgtcgatcttgcggaaatccgcgccgtcgcgcagcaactggctgaaaccggcgaaataggggaacagtacacggttgacgaagaagccggggcagtcgtacacggttgacgaagaagccggggcagtcgttaaccacaatcggcgttttgcccatcttgctcgcccaggcgacgactttcgcgatggtttcgtcggagcttttctcgccgcgaataatttctactaacggcattcggtggaccgggttaaagaagtgcatcccgcagaagttttccggacgttccagcgcgttggccagttcgctgataggaatggttgaagtgttagacgccagtacggtatccgggcgtactttctgctcggtttctgccagcactgcttttttcactttcgggttttcaacaaccgcttctaccacaacatccacgcggtcaaacccggcgtagtcgagcgttgggtgaattgtggagatcacgccagccagtttcagaccatcgatcttgccgcgctcaagctgcttgttcagcagtttcgcggcttcggtcatgccgagggttaacgacttgtcgttgatatctttcatgacaaccggcacgcctttccacgcagactggtaggcgatgccgccgcccataatgcctgcgcccagcacagcggcctgtttcggggtttcaacatctttggtgagtttcttcgctttaccttttacatattgatcgttaaggaaaatgccgaccagtgcgcgggcttcgttggtatgcgccagcgggacaaaacttttgttttccaggtttaaggcttcttcacgaccaaaacgggccgcagcttcaatggtttttactgcggtgatgggggccggataatgtttccccgccgtttgcgcgaccatccctttagcgatggtgaagctcatggcggcttcaatcttgctcagttttagcggttccagcttcggctgacgttttgctttccagtcgaggtcgccgttaatggcctggcgtaaaatcgccatcgccccttcaaccagtttttctgctttgactacaccatccaccagaccgattttcagcgcctgatccgcgccgacatctttaccggcggcaatgatttccagcgcactgtcagcaccgagcatacgtggcatacgtacagaaccgccaaagcccggcatgatgcccagtttggtttccggcagaccgatgcgcagatccggcgtcgccagacgataatcggtcgccagcacgcattcgcagccaccgcccagcgcatagccgttgacggcagcaatggtcggcaccgggagatcttccaggcgattaaacacgctattggcaaagtgcagccactgacttaactgttcttcaggaacgaggaacagggacaaaaattcggtgatatcagcaccgacgataaaggctgctttgttcgaacgcagcagcagcccttttagatctgattgctgttccagcacgccgatggcctcgccgaggctggcgacggtggcagtgtcgagtttattaactgaacctggggcatcaaataccagttcggcaatgccatcttccagccagtcaaggtacagggtgtcgcctttgtaaagcatgtcagtctcctgaatccgcaaggtgatctggtcgtaccagatgcatcgaagtgtgtattttgtgttaaaaatatgcaaataaaatattaaggaaatgccgatctgatcacgctcggcagaaatcacgctctggatgaacgatgtgctaagatgcggagacttaaggtcaaaaaaacagaagggtaaaaaatggaatcactggcctcgctctataaaaatcatatagctaccttacaggaacggactcgcgatgcgctggcgcgcttcaagctggatgcgttacttattcactccggcgaactgttcaacgtttttctcgacgatcatccctatccgtttaaagtgaacccgcaattcaaagcgtgggtgccggtaactcaggtgccaaactgctggctgctggtggatggcgtgaataagccgaaactgtggttttatctgccggttgattactggcacaacgtcgaaccgctgccgaactccttctggactgaagatgtagaagtgatcgcgctgccaaaagccgatggcattggtagtctgttgcctgctgcgcgcggcaatatcggttatatcggtccggtgccagaactcctgctggatgccggggccgaatataacggctatgcggctgatctaacccgtacctggtcggcaaaaagcgacaacgactacgcacagctggtgaaagacgtaaatgatgagcaactggcgctgatcgccaccatgaaagcaggcgtcagctatgtggattaccatatccagttccatcagcgcatcgccaaactgctgcgtaaacatcaaatcatcaccgatatgagtgaagaagcgatggtcgaaaacgatctcaccggaccgtttatgccgcacggtatcggccatccgctgggcctgcaggtgcatgacgtagccggttttatgcaggatgatagcggtacgcacctcgcggcaccggcaaaatatccgtacctgcgctgcacccgtattctccagccgggcatggtgttaaccatcgaaccgggtatctacttcatcgaatcgcttctggcaccgtggcgtgaagggcagttcagcaaacacttcaactggcagaaaattgaagcactgaaaccgttcggcggcattcgtatcgaagacaacgtggtgattcacgaaaacaacgtggaaaacatgacccgggatctgaaactggcgtgatggaaagctggttaattcctgcggcaccggtcacggtcgttgaagagatcaaaaagagccgcttcattacgctgttggcttcgcgatggtttcgtcggagcttttctcgccgcgaataatttctactaacggcattcggtggaccgggttaaagaagtgcatcccgcagaagttttccggacgttccagcgcgttggccagttcgctgataggaatggttgaagtgttagacgccagtacggtatccgggcgtactttctgctcggtttctgccagcactgcttttttcactttcgggttttcaacaaccgcttctaccacaacatccacgcggtcaaacccggcgtagtcgagcgttgggtgaattgtggagatcacgccagccagtttcagaccatcgatcttgccgcgctcaagctgcttgttcagcagtttcgcggcttcggtcatgccgagggttaacgacttgtcgttgatatctttcatgacaaccggcacgcctttccacgcagactggtaggcgatgccgccgcccataatgcctgcgcccagcacagcggcctgtttcggggtttcaacatctttggtgagtttcttcgctttaccttttacatattgatcgttaaggaaaatgccgaccagtgcgcgggcttcgttggtatgcgccagcgggacaaaacttttgttttccaggtttaaggcttcttcacgaccaaaacgggccgcagcttcaatggtttttactgcggtgatgggggccggataatgtttccccgccgtttgcgcgaccatccctttagcgatggtgaagctcatggcggcttcaatcttgctcagttttagcggttccagcttcggctgacgttttgctttccagtcgaggtcgccgttaatggcctggcgtaaaatcgccatcgccccttcaaccagtttttctgctttgactacaccatccaccagaccgattttcagcgcctgatccgcgccgacatctttaccggcggcaatgatttccagcgcactgtcagcaccgagcatacgtggcatacgtacagaaccgccaaagcccggcatgatgcccagtttggtttccggcagaccgatgcgcagatccggcgtcgccagacgataatcggtcgccagcacgcattcgcagccaccgcccagcgcatagccgttgacggcagcaatggtcggcaccgggagatcttccaggcgattaaacacgctattggcaaagtgcagccactgacttaactgttcttcaggaacgaggaacagggacaaaaattcggtgatatcagcaccgacgataaaggctgctttgttcgaacgcagcagcagcccttttagatctgattgctgttccagcacgccgatggcctcgccgaggctggcgacggtggcagtgtcgagtttattaactgaacctggggcatcaaataccagttcggcaatgccatcttccagccagtcaaggtacagggtgtcgcctttgtaaagcatgtcagtctcctgaatccgcaaggtgatctggtcgtaccagatgcatcgaagtgtgtattttgtgttaaaaatatgcaaataaaatattaaggaaatgccgatctgatcacgctcggcagaaatcacgctctggatgaacgatgtgctaagatgcggagacttaaggtcaaaaaaacagaagggtaaaaaatggaatcactggcctcgctctataaaaatcatatagctaccttacaggaacggactcgcgatgcgctggcgcgcttcaagctggatgcgttacttattcactccggcgaactgttcaacgtttttctcgacgatcatccctatccgtttaaagtgaacccgcaattcaaagcgtgggtgccggtaactcaggtgccaaactgctggctgctggtggatggcgtgaataagccgaaactgtggttttatctgccggttgattactggcacaacgtcgaaccgctgccgaactccttctggactgaagatgtagaagtgatcgcgctgccaaaagccgatggcattggtagtctgttgcctgctgcgcgcggcaatatcggttatatcggtccggtgccagaacgtgcgctgcaactgggtattgaggccagcaatatcaacccgaaaggggtgatcgactacctgcattactatcgctccttcaaaaccgagtacgaactggcctgtatgcgtgaagcgcagaaaatggcggtcaacggtcatcgcgcggcagaagaagcgttccgttctggcatgagcgagttcgatatcaacattgcctatctgaccgcgaccggtcatcgtgataccgacgtaccttatagcaacattgtggcgcttaacgaacacgctgcggtgttgcattacaccaaactggaccaccaggcaccggaagagatgcgcagcttcctgctggatgccggggccgaatataacggctatgcggctgatctaacccgtacctggtcggcaaaaagcgacaacgactacgcacagctggtgaaagacgtaaatgatgagcaactggcgctgatcgccaccatgaaagcaggcgtcagctatgtggattaccatatccagttccatcagcgcatcgccaaactgctgcgtaaacatcaaatcatcaccgatatgagtgaagaagcgatggtcgaaaacgatctcaccggaccgtttatgccgcacggtatcggccatccgctgggcctgcaggtgcatgacgtagccggttttatgcaggatgatagcggtacgcacctcgcggcaccggcaaaatatccgtacctgcgctgcacccgtattctccagccgggcatggtgttaaccatcgaaccgggtatctacttcatcgaatcgcttctggcaccgtggcgtgaagggcagttcagcaaacacttcaactggcagaaaattgaagcactgaaaccgttcggcggcattcgtatcgaagacaacgtggtgattcacgaaaacaacgtggaaaacatgacccgggatctgaaactggcgtgatggaaagctggttaattcctgcggcaccggtcacggtcgttgaagagatcaaaaagagccgcttcattacgctgttggcgcataccgatggcgttgaggcggcaaaagcgtttgttgaatcggtgcgggcagaacaccccgatgcccgccaccattgcgtggcgtgggtggcgggtgcgccggatgattctcaacaactgggtttctctgacgacggggagccggcgggaacggcaggtaaaccgatgctcgcccaactaatgggcagcggcgtcggggaaattaccgctgtggtggtgcgctactacggcggcatattgcttggcaccggtgggttagtgaaagcgtatggcggcggcgtgaatcaggcgctgcgccagctaacgacccaacgcaagacaccattaaccgaatatactttgcaatgtgaatatagtcagttaaccggcattgaagcgttgctggggcagtgtgacggcaaaattatcaacagtgattatcaggcattcgttctgctgcgggtggcgcttccggcggcgaaagtggctgaattttccgcaaagctggcggattttagccgtggttcattgcaattgttagcgattgaagaataatccccacttcgttttgcagaactaaggaagcggcagagatgcattttcgcgccattacccgaatcgttggactactggtcatcttattttcagggaccatgattatccctgggctggtagcactcatctaccgggatggagcgggacgcgcttttacccagaccttttttgtcgccctcgccattggctctatgctttggtggccgaaccgcaaagagaagggcgaactgaaatcccgtgaggggtttctgatagtggtgctgttctggaccgtgctgggtagcgtcggtgcgctcccttttatcttctcggaaagcccgaacctcacgattaccgatgcgttttttgaatctttctctggcctgaccaccacgggggccactacgctggtggggctggattcgctccctcatgccatcctcttttatcgccagatgctgcaatggtttggcggtatggggatcatcgtgctggcggttgcgatactgcctatcctcggcgtgggtgggatgcagctctatcgcgcagaaatgcccggcccgctgaaagataacaaaatgcgcccgcgaattgcggaaacggcgaaaaccctgtggttgatttatgtcttgctgaccgtcgcctgtgcgctggcgttgtggtttgctggaatggatgcctttgatgccatcggccatagctttgcgaccatcgctattggcggcttctcgacacatgatgccagtatcggttatttcgacagcccgactattaacactatcattgctatcttcctgctgatctctggctgtaactacggtctgcacttttcactgttaagtgggcgtagtctgaaggtttattggcgcgatccggaatttcgcatgtttatcggcgtacagttttcactggtggttatttgtacactcgtactgtggtttcataatgtctacagttcggcgctgatgacaattaaccaagcgtttttccaggtggtgtcgatggcgacaaccgccgggtttacaactgacagcattgcccgctggccgctctttttgccggtactgcttttatgttcagcttttatcggcggttgcgccgggtcaacgggcggtggcctgaaagtgatccgcatcctgctgctgtttaagcaggggaaccgtgagctgaaacgactggtgcatccgaacgccgtctatagcattaagctggggaatcgcgcactgccggaacgtatcctcgaagccgtttggggatttttctccgcctatgcattggtgtttattgtcagtatgctggcgattatcgccacgggcgtggatgacttttctgcctttgcctcggttgttgcaacattgaataacctggggccagggcttggcgtggttgctgataactttaccagtatgaacccggtggctaaatggatcctgattgccaacatgctgtttggtcgtctcgaggtctttacattgctggtgctctttaccccgactttctggcgtgaatgatggagtaatacgtgaaaacattaattcttttctcaacaagggacggacaaacgcgcgagattgcctcctacctggcttcggaactgaaagaactggggatccaggcggatgtcgccaatgtgcaccgcattgaagaaccacaatgggaaaactatgaccgtgtggttattggcgcttctattcgctatggtcactaccattctgcgttccaggaatttgtcaaaaagcatgcgacgcggttgaattcgatgccgagtgccttttactccgtaaatctggtggcgcgtaaaccggagaagcgtactccacagaccaacagctacgcgcggaagtttctgatgaactcgcaatggcgtcccgatcgctgtgccgtcattgccggggcgctgcgttacccacgttatcgctggtacgaccgttttatgatcaagctgattatgaagatgtcaggcggtgaaacggatacgcgcaaagaagttgtctataccgattgggagcaggtggcgaatttcgcccgagaaatcgcccatttaaccgacaaaccgacgctgaaataagcataaagaataaaaaatgcgcggtcagaaaattattttaaatttcctcttgtcaggccggaataactccctataatgcgccaccactgacacggaacaacggcaaacacgccgccgggtcagcgggattctcctgagaattccggcagagaaagcaaaaataaatgcttgactctgtagcgggaaagcgtattatgcacaccccgcgccgctgagaaaaagcgaagcggcactgctctttaacaatttatcagacaatctgtgtgggcactcgaagatacggattcttaacgtcgcaagacgaaaaatgaataccaagtctcaagagtgaacacgtaattcattacgaagtttaattctttgagcatcaaacttttaaattgaagagtttgatcatggctcagattgaacgctggcggcaggcctaacacatgcaagtcgaacggtaacaggaaacagcttgctgtttcgctgacgagtggcggacgggtgagtaatgtctgggaaactgcctgatggagggggataactactggaaacggtagctaataccgcataacgtcgcaagaccaaagagggggaccttcgggcctcttgccatcggatgtgcccagatgggattagcctagtaggtggggtaaaggctcacctaggcgacgatccctagctggtctgagaggatgaccagccacactggaactgagacacggtccagactcctacgggaggcagcagtggggaatattgcacaatgggcgcaagcctgatgcagccatgccgcgtgtatgaagaaggccttcgggttgtaaagtactttcagcggggaggaagggagtaaagttaatacctttgctcattgacgttacccgcagaagaagcaccggctaactccgtgccagcagccgcggtaatacggagggtgcaagcgttaatcggaattactgggcgtaaagcgcacgcaggcggtttgttaagtcagatgtgaaatccccgggctcaacctgggaactgcatctgatactggcaagcttgagtctcgtagaggggggtagaattccaggtgtagcggtgaaatgcgtagagatctggaggaataccggtggcgaaggcggccccctggacgaagactgacgctcaggtgcgaaagcgtggggagcaaacaggattagataccctggtagtccacgccgtaaacgatgtcgacttggaggttgtgcccttgaggcgtggcttccggagctaacgcgttaagtcgaccgcctggggagtacggccgcaaggttaaaactcaaatgaattgacgggggcccgcacaagcggtggagcatgtggtttaattcgatgcaacgcgaagaaccttacctggtcttgacatccacggaagttttcagagatgagaatgtgccttcgggaaccgtgagacaggtgctgcatggctgtcgtcagctcgtgttgtgaaatgttgggttaagtcccgcaacgagcgcaacccttatcctttgttgccagcggtccggccgggaactcaaaggagactgccagtgataaactggaggaaggtggggatgacgtcaagatgagaatgtgccttcgggaaccgtgagacaggtgctgcatggctgtcgtcagctcgtgttgtgaaatgttgggttaagtcccgcaacgagcgcaacccttatcctttgttgccagcggtccggccgggaactcaaaggagactgccagtgataaactggaggaaggtggggatgacgtcaagtcatcatggcccttacgaccagggctacacacgtgctacaatggcgcatacaaagagaagcgacctcgcgagagcaagcggacctcataaagtgcgtcgtagtccggattggagtctgcaactcgactccatgaagtcggaatcgctagtaatcgtggatcagaatgccacggtgaatacgttcccgggccttgtacacaccgcccgtcacaccatgggagtgggttgcaaaagaagtaggtagcttaaccttcgggagggcgcttaccactttgtgattcatgactggggtgaagtcgtaacaaggtaaccgtaggggaacctgcggttggatcacctccttaccttaaagaagcgtactttgcagtgctcacacagattgtctgatgaaaatgagcagtaaaacctctacaggcttgtagctcaggtggttagagcgcacccctgataagggtgaggtcggtggttcaagtccactcaggcctaccaaatttgcaccgcaaatttgaagaggttttaactacatgttatggggctatagctcagctgggagagcgcctgctttgcacgcaggaggtctgcggttcgatcccgcatagctccaccatctctgtagtgattaaataaaaaatacttcagagtgtacctgcaaaggttcactgcgaagttttgctctttaaaaatctggatcaagctgaaaattgaaacactgaacaacgagagttgttcgtgagtctctcaaattttcgcaactctgaagtgaaacatcttcgggttgtgaggttaagcgactaagcgtacacggtggatgccctggcagtcagaggcgatgaaggacgtgctaatctgcgataagcgtcggtgaggtgatatgaaccgttataaccggcgatttccgaatggggaaacccagtgtgtttcgacacactatcattaactgaatccataggttaatgaggcgaaccgggggaactgaaacatctaagtaccccgaggaaaagaaatcaaccgagattcccccagtagcggcgagcgaacggggaggagcccagagcctgaatcagtgtgtgtgttagtggaagcgtctggaaaggcgtgcgatacagggtgacagccccgtacacaaaaatgcacatattgtgagctcgatgagtagggcagggacaccgtggtatcctgtctgaatatggggggaccatcctccaaggctaaatactcctgactgaccgatagtgaaccagtaccgtgagggaaaggcgaaaagaaccccggcgaggggagtgaaaaagaacctgaaaccgtgtacgtacaagcagtgggagcctcttaatggggtgactgcgtaccttttgtataatgggtcagcgacttatattctgtagcaaggttaaccgaataggggagccgaagggaaaccgagtcttaactgggcgttaagttgcagggtatagacccgaaacccggtgatctagccatgggcaggttgaaggttgggtaacactaactggaggaccgaaccgactaatgttgaaaaattagcggatgacttgtggctgggggtgaaaggccaatcaaaccgggagatagctggttctccccgaaagctatttaggtagcgcctcgtgaattcatctccgggggtagagcactgtttcggcaagggggtcatcccgacttaccaacccgatgcaaactgcgaataccggagaatgttatcacgggagacacacggcgggtgctaacgtccgtcgtgaagagggaaacaacccagaccgccagctaaggtcccaaagtcatggttaagtgggaaacgatgtgggaaggcccagacagccaggatgttggcttagaagcagccatcatttaaagaaagcgtaatagctcactggtcgagtcggcctgcgcggaagatgtaactggggctaaaccatgcaccgaagctgcggcagcgacactatgtgttgttgggtaggggagcgttctgtaagcctgtgaaggtggcctgtgagggttgctggaggtatcaagaagtgcgaatgctgacataagtaacgataaagcgggtgaaaagcccgctcgccggaagaccaagggttcctgtccaacgttaatcggggcagggtgagtcgacccctaaggcgaggccgaaaggcgtagtcgatgggaaacaggttaatattcctgtacttggtgttactgcgaaggggggacggagaaggctatgttggccgggcgacggttgtcccggtttaagcgtgtaggctggttttccaggcaaatccggaaaaccaaggctgaggcgtgatgacgaggcactacggtgctgaagcgacaaatgccctgcttccaggaaaagcctctaagcatcaggtaacatcaaatcgtaccccaaaccgacacaggtggtcaggtagagaataccaaggcgcttgagagaactcgggtgaaggaactaggcaaaatggtgccgtaacttcgggagaaggcacgctgatatgtaggtgaagcgacttgctcgtggagctgaaatcagtcgaagataccagctggctgcaactgtttattaaaaacacagcactgtgcaaacacgaaagtggacgtatacggtgtgacgcctgcccggtgccggaaggttaattgatggggttagccgcaaggcgaagctcttgatcgaagccccggtaaacggcggccgtaactataacggtcctaaggtagcgaaattccttgtcgggtaagttccgacctgcacgaatggcgtaatgatggccaggctgtctccacccgagactcagtgaaattgaactcgctgtgaagatgcagtgtacccgcggcaagacggaaagaccccgtgaacctttactatagcttgacactgaacattgagccttgatgtgtaggataggtgggaggctttgaagtgtggacgccagtctgcatggagccgaccttgaaataccaccctttaatgtttgatgttctaacgttggcccgtaatccgggttgcggacagtgtctggtgggtagtttgactggggcggtctcctcctaaagagtaacggaggagcacgaaggttggctaatcttccttgtcgggtaagttccgacctgcacgaatggcgtaatgatggccaggctgtctccacccgagactcagtgaaattgaactcgctgtgaagatgcagtgtacccgcggcaagacggaaagaccccgtgaacctttactatagcttgacactgaacattgagccttgatgtgtaggataggtgggaggctttgaagtgtggacgccagtctgcatggagccgaccttgaaataccaccctttaatgtttgatgttctaacgttggcccgtaatccgggttgcggacagtgtctggtgggtagtttgactggggcggtctcctcctaaagagtaacggaggagcacgaaggttggctaatcctggtcggacatcaggaggttagtgcaatggcataagccagcttgactgcgagcgtgacggcgcgagcaggtgcgaaagcaggtcatagtgatccggtggttctgaatggaagggccatcgctcaacggataaaaggtactccggggataacaggctgataccgcccaagagttcatatcgacggcggtgtttggcacctcgatgtcggctcatcacatcctggggctgaagtaggtcccaagggtatggctgttcgccatttaaagtggtacgcgagctgggtttagaacgtcgtgagacagttcggtccctatctgccgtgggcgctggagaactgaggggggctgctcctagtacgagaggaccggagtggacgcatcactggtgttcgggttgtcatgccaatggcactgcccggtagctaaatgcggaagagataagtgctgaaagcatctaagcacgaaacttgccccgagatgagttctccctgactccttgagggtcctgaaggaacgttgaagacgacgacgttgataggccgggtgtgtaagcgcagcgatgcgttgagctaaccggtactaatgaaccgtgaggcttaaccttacaacgccgaagatgttttggcggatgagagaagattttcagcctgatacagattagattaaccggcgacaagcgggttaatgaaacagaatttgcctggcggccttagcgcggtggtcccacctgaccccatgccgaactcagaagtgaaacgccgtagcgccgatggtagtgtggggtctccccatgcgagagtagggaactgccaggcatcaaattaagcgaaaggcccagtcggaagactgggcttttttgcgttggtgcggaataaatgccggatgcgacgctggcgcgtttgctccagcctactcttgcttatccgtcctgcttttgcatccactccaccacaaaatcagccagcccctcaacatcattaatatccagtaacgcgacatcaagattaagcggcacatcactggctacagcaataacatgcctgtctatcactaattcttccggtcgatgtccggctccatcgcgaaacagcacaatctttgcgatctcttcatgcttaaacccttcgaccagaatcaaatccagctttgaggtatccattcgacttgcgagaaaatgtagatccagctcttcttcgtctggtgtttccgtcatcaaggcccatcgctgttggctggcaacgatggtttgcgccgcgccagccttgcgcagctcataactatctttgcccggtttatcaacatccatatcatggtgcgtatgcttaatcagccccggacggatccctctggcgcataatgccgggatcaattttttcagcagcgttgtttttccggtgccactccatgcagcaaaggcgagtaacggtatcatcgtttttcctgccatcgggcaagctcctctggcgtattcacgtttataaatgcctctttacgatcgctgaaatcaaccgcatgaccgccagccagacgcataaatgccataacccggcgttctcctgcttgcagatattccagtaataaaggctcaattgcgcggtttaccagagcaatagtcgggtgatcgcgttcaccgtcgtggacccacacgacaggcgcatctttgcgctgatgagtaagccgggcggctaaatcatggggaatgtaaggcgtatcgcacgggcaaaacaaaaaccactcacccgcttcctgctgcattactgaaagcattcctgccagaggaccagggtaatccgccagtgaatcttcaatcactttcagaccgcttacctgatagatttcctgatgacgattagcattaaccacgacgtgagaaagctgcgtcataagcgcgtcagcgacatactgccataatggtttgccgtttaattcaagcaatcctttatctacgccgcccattcgtctggctttaccgcccgccagcacaacgcctgttatcatcgtcatcagattcaccgatatcgcctcttttattgtgggattgaccctgctaacgtgtctgtctcaagagtaaggagcattactatgaaatgtaaacgtctgaatgaagttattgaactcctccagccagcctggcaaaaagagccagaccttaacctgctgcaatttttgcagaaactggcgaaagagtcaggttttgacggcgaactggcggatttgacggatgacattctgatctatcacctgaaaatgcgtgattccgcgaaagatgcggtgatcccgggtttgcagaaagattatgaagaagatttcaaaacggcgctattacgcgcacgtggcgtaattaaagagtaaaagcttgtaagcggcgcaaccaaaatcatcgtgaaatgatatccttcatcattcgtaatgttttccggatgatgggatgaacaacagcgcttttactttccagacactacacccggataccatcatggacgctctgtttgagcatgggattcgggtggattccggtcttaccccgcttaacagctatgaaaaccgtgtctatcaatttcaggacgaagatcgtcgacgttttgtcgtcaaattttatcgccctgaacgttggacagccgatcaaatcctcgaagaacatcaatttgcgttgcagctggttaacgatgaagttccggtcgcagcacctgtggcctttaatggtcagactttattgaaccatcagggattttatttcgctgtttttccaagcgtcggtggtcgccagttcgaagctgataatatcgatcagatggaagcggttgggcgttatttagggcgtatgcaccagacggggcgcaaacagctttttatccatcgcccgaccatcggtttgaatgaatatctcattgagccacgcaagctgtttgaggacgctacactgataccttccgggttgaaagcggcattcctgaaagcgacagatgagctgattgccgccgttacagcacactggcgggaagatttcaccgttctgcggctacatggagactgccacgccgggaatattctctggcgcgatggtccaatgtttgttgatctggatgatgcacgtaatggtccagccgttcaggatttgtggatgttgctcaatggtgataaagccgagcagcggatgcaactggaaactattattgaggcttatgaagaatttagcgagttcgacaccgctgaaatcggactgattgaacctttacgcgccatgcgtttggtttattatcttgcctggctaatgcggcgttgggctgatcccgcgttcccgaaaaatttcccgtggttaaccggggaagattactggctacgacagacggcgacttttatagaacaggcaaaagttctacaagaaccccctttgcaattaacacctatgtattaatcggagagagtagatcatgaaaaagatttggctggcgctggctggtttagttttagcgtttagcgcatcggcggcgcagtatgaagatggtaaacagtacactaccctggaaaaaccagttgctggcgcgccgcaagtgctggagtttttctctttcttctgcccgcactgctatcagtttgaagaagttctgcatatttctgataacgtgaagaaaaaactgccggaaggcgtgaagatgactaaataccacgtcaacttcatggggggtgacctgggcaaagagctgactcaggcatgggctgtggcgatggcgctgggcgtggaagacaaagtcacagttccgctgtttgaaggcgtacaaaaaacccagaccattcgttcagcatctgatatccgcgatgtatttatcaacgcaggtattaaaggtgaagagtacgacgcggcgtggaacagcttcgtggtgaaatctctggtcgctcagcaggaaaaagctgcagctgacgtgcaattgcgtggtgttccggcgatgtttgttaacggtaaatatcagctgaatccgcagggtatggataccagcaatatggatgtttttgttcagcagtatgctgatactgtgaaatatctgtccgagaaaaaataattcaatgtaaattacataaagcccgtgaatattcacgggctttttttattatttaataaatataaatacattctgataatgcgtcctgctgctggacattatttcagcataagtggatattcaaagttttgctgttttatcagggaatatttatatgatacgtaagtcagctacaggtgccattgttgcgttagccgtaatctggggtggtggcacatggtacacaggtacgcaaattcagcctggtgtcgaaaagtttattaaaggttttaacgatgctaaaaagaaaggtgaacatgcctacgatatgacgttaagttataaaaattttgacaaaggcttttttaattcccgttttcaaatgcaaatgacatttgataacggtgcacccgatctcaatatcaagccaggccagaaaattgtatttgatgtggatgttgagcacggtccgttgcccatcacaatgttaatgcatggtaatgtcatcccagcactggcagcggcaaaagtgaacttagtgaataatgagctgacacaaccgctatttatcgccgcgaaaaataaatcgcccgtggaagcgacattgcgattcgcgtttggtggctcattctccacgacattagatgttgcccctgcagagtatggaaagttttcttttggtgaaggccagtttacttttaatggtgatgatagttcattgtctaacctggatattgaaggcaaagtcgaagatattgttctgcaattttcaccaatgaacaaagtaacggcgaaaagttttaccattgattctctgacacgattagaagaaaagaaatttccggttggtgaaagcgagtcgaaatttaatcaggttaatattatcaaccagggggaagtcgttgcccaaatcgatgctttcgttgcaaaaaccaggctggatcgcgttaaagacaaagattatatcaatgtcaatctgacctacgaacttgataagttaacaaaagggaatcagcaactcggtagtggtgagtggtcattgattgctgagtctattgatccctcagcggtgcgccaatttatcatccagtataacattgcgatgcagaagcagcttgctgcacaccctgagttagcaaacgatgaagttgctctgcaagaagtgaatgctgcattgttcaaagagtatttaccgttattacaaaaaagtgagccgaccattaaacaaccggtaagatggaagaacgcactcggcgaactaaatgccaatctggatatcagtattgccgacccagccaaatcttcatcatccacaaacaaagatattaaatcgctcaattttgatgtgaagttaccgcttaatgtcgccacagaaaccgcaaaacagcttaatttatctgaagggatggatgcggaaaaagcgcaaaagcgggctgataaacaaatcagcgggatgatgacattaggtcagatgttgcagttaatcacgattgacaacaataccgcctcgctgcaactgcgttatacaccgggtaaagttgtttttaacggacaggagatgagcgaagaagaatttatgtctcgtgccggacgttttgctcattaaaatactcactcgcctctgctcattcagaggcgagtaaaacttacttttcctgccgctgtgatgacatcaacgatgtcagaagccggtctttttcctgccacaatgagttcagccattgctgaaaatggcgcttaaagcttttgtcattgatgtagtcgccatgtaactcatcggcaataggctgtaaatccacatgtacgacaattcgcgtcagtttaccgcttaacatatcgaagaacggctgacggttattgtccggataacacagcgtaacattaagcagtttatcgaattgtttacccagtacatttagcgccattgcaatgcctgccgcctttggtggcaacaagttttgaaaagtggagtgggtttgctgatgtttttcttgcgtgaaacgggagccttcaacgaaattgacaatagtggtgggatgcaggcgaaacttttcacaagaacgccgagtggtttcaacatctttaccacgtcgctccggatgacgtaataaataagcgcgggaataacgcttcataaacggcatatccagcgcccagcacgccaggccaagaaaaggcacccaggccagctgctgcttgaggaaatatttattcatcggaatgtgcttacgaaacagcacgcacagtacgacaatatctgcccaactacggtggttacaaataagtagataccagttcttcttacttaacccttccagcccgtgaacttcccattgcaggtgtgggttcagatgcagtaataccgccagaccttcacaccagcaatacatcataaaatcacaaaaacgcgaaacctttcgccaaatgactggcacaggtagcaatagttttacaatcccggcaatgatgatcgggacggaacaaaaaatagtgaccaaaatggtcaatacgatactcagcaaaagggttatcgcagcgagtattctcgtcataatgaatttattcaaaaggttagccatagacagtgcgctaaagaagcgcaaggcgcagattttagcagaaaacgacccaaataacggatgatccttaaggagaaaaataattcatatctatccacattagaaaaaatcccattatctcaattattagggatggctttatttttaactgcatgaaaaacaaagataaacaccatgctgtaaaaagcatgataataaattaaaagcgatgtaaataatttatgcacaaagttatccacatgacgatttgcgagcgatccagaagatctacaaaagattttcacgaaaagcggtgaaaaactcatgttttcatcctgtctgtggcatcctttacccataatctgataaacaggcacggacattatggttcagatcccccaaaatccacttatccttgtagatggttcatcttatctttatcgcgcatatcacgcgtttcccccgctgactaacagcgcaggcgagccgaccggtgcgatgtatggtgtcctcaacatgctgcgcagtctgatcatgcaatataaaccgacgcatgcagcggtggtctttgacgccaagggaaaaacctttcgtgatgaactgtttgaacattacaaatcacatcgcccgccaatgccggacgatctgcgagcacaaatcgaacctctgcacgcgatggttaaagcgatgggactgccgctgctggcggtttctggcgtagaagcggacgacgttattggtactctggcgcgcgaagccgaaaaagccgggcgtccggtgctgatcagcactggcgataaagatatggcgcagctggtgacaccaaatatcacgcttatcaacaccatgacgaataccatcctcggaccggaagaggtggtgaataagtacggcgtgccgccagaactgatcatcgatttcttggcgctgatgggtgactcctctgataacattcctggcgtaccgggcgtcggtgaaaaaaccgcgcaggcattgctgcaaggtcttggcgggctggatacgctgtatgccgagccagaaaaaattgctgggttgagcttccgtggcgcgaaaacaatggcagcgaagctcgagcaaaacaaagaagttgcttatctctcataccagctggcgacgattaaaaccgacgttgaactggagctgacctgtgaacaactggaagtgcagccaccggcggcggaagagttgttagggctgttcaaaaagtatgagttcaaacgctggactgctgatgtcgaagcgggaaaatggctacaggctaaaggagcgaaacccgcagccaggccgcaggaaaccagtgttgcagacgaagcgccagaagtgacggcaacggtgatttcttatgacaactacgtcaccatccttgatgaagaaacactgaaagcgtggattgcgaagctggaaaaagcgccggtatttgcatttgataccgaaaccgacagccttgataacatctctgctaacctggtcgggctttcttttgctatcgagccaggcgtagcggcatatattccggttgctcatgattatcttgatgcgcccgatcaaatctctcgcgagcgtgcactcgagctgctaaaaccgctgctggaagatgaaaaggcgctgaaggtcgggcaaaacctgaaatacgatcgcggtattctggcgaactacggcattgaactacgtgggattgcgtttgataccatgctggagtcctacattctcaatagcgttgccggacgtcacgatatggacagcctcgcggaacgttggttgaagcacaaaaccatcacttttgaagagattgcgggtaaaggcaaaaatcaactgacctttaaccagattgccctcgaagaagccggacgttacgccgccgaagatgcagatgtcaccttgcagttgcatctgaaaatgtggccggatctgcaaaaacacaaagggccgttgaacgtcttcgagaatatcgaaatgccgctggtgccggtgctttcacgcattgaacgtaacggtgtgaagatcgatccgaaagtgctgcacaatcactctgaagagctcaccttgcgtctggctgagctggaaaagaaagcgcatgaaattgcaggtgaagaatttaacctttcttccaccaagcagttacaaaccattctgtttgaaaaacagggcattaaaccgctgaagaaaacgccgggtggcgcgccgtcaacgtcggaagaggtactggaagaactggcgctggactatccgttgccaaaagtgattctggagtatcgtggtctggcgaagctgaaatcgacctacaccgacaagctgccgttgatgatcaacccgaaaaccgggcgtgtacatacctcttatcaccaggcagtaaccgcaacgggacgtttatcgtcaaccgatcctaacctgcaaaacattccggtgcgtaacgaagaaggtcgccgtatccgccaggcgtttattgcgccagaggattatgtgattgtctcagcggactactcgcagattgaactgcgcattatggcgcatctctcgcgtgacaaaggcttgctgaccgcattcgcggaaggaaaagatatccaccgtgcaacggcggcagaagtgtttggtttgccactggaaaccgtcaccagcgagcaacgtcgtagtgcaaaagcgatcaactttggtctgatttatggcatgagtgctttcggtctggcgcggcaattgaacattccgcgtaaagaagcgcagaagtacatggacctttacttcgaacgctaccctggcgtgctggagtatatggaacgcacccgtgctcaggcgaaagagcagggctacgttgaaacgctggacggacgccgtctgtatctgccggatatcaaatccagcaatggtgctcgtcgtgcagcggctgaacgtgcagccattaacgcgccaatgcagggaaccgccgccgacattatcaaacgggcgatgattgccgttgatgcgtggctacaggctgagcaaccgcgcgttcgtatgatcatgcaggtacacgatgaactggtatttgaagtccataaagatgatgtcgatgccgtcgcgaagcagattcatcaactgatggaaaactgtacccgtctggatgtgccgttgctggtggaagtggggagtggcgaaaactgggatcaggcgcactaagattcgcctgaacatgcccttttttcgtaagtaagcaacataagctgtcacgttttgtgatggctattagaaattcctatgcaacaactgaaaaaaaattacaaaaaatgctttctgaactgaacaaaaaagagtaaagttagtcgcgtagggtacagaggtaagatgttctatctttcagaccttttacttcacgtaatcggatttggctgaatattttagccgccccagtcagtaatgactggggcgttttttattgggcgaaagaaaagatccgtaatgcctgatacgccatgtttatcaggccaacggtagaattgtaatctattgaatttacgggccggatacgccacatccggcacaagcattaaggtaagaaaattattcgccgtcctgcgtttcttctacaggctgcatctcgctaaaccaggtatccagtttctgccgcagcttgtccacgccttgtttcttcagcgaagaaaacgtttcaacctgcacatcaccgttaaacgccagcaccgcttcacgcaccatattcaattgcgctttacgtgcgccgcttgccagtttgtccgctttggtcagcagtaccagcacggcgatattgctgtctaccgcccactcaatcatctgctgatccaaatctttcagcggatggcgaatatccattagcaccaccagaccttgcaggctctgacgtttttcgaggtactcgccgagcgcgcgctgccatttgcgcttcatctcttccgggacttccgcataaccgtatccaggcaagtcaaccagacgcttgccgtcagccacttcaaacaggttgataagctgggtgcgccctggggtttttgaggtacgagccaggcttttctggttagtcagcgtgttcagcgcgctggatttacctgcgttggaacggcctgcaaaagccacttcaattccggtatcggaaggtaggtggcgaatatcaggcgcactcatcacaaaatgcgtctgttgataattcaaattagtcaaagcggtcgtctccatcagtcaaagctttgcggcgattatacctgaaccataataaaaggcggatttttcggcgtgagcgttgtaagtaaaagccatatgctttgtgagacattgccgatagtctttatgcgaaatagcagagaaaattctgcgacgcatgtcaaataagctatataaatcagtgaattgcttttatataaaactctgaaaatgtgcaaatactgatggcggttgattgtttatttaaagcaaaggcgtaaagtagcacccatagagcgaggacgctaacaggaacaatgactcaggatgagggtcaggagcgccaggaggcgaagacagaggattgtcaggaagataaacgtccggagacgtaattaaatggaaatggaatcaacacggattgttccggctaatggaaaaacagggtgtgttggcggcctgcaaggattgtaagacccgttaagggttatgagtcaggaaaaaaggcgacagagtaatctgtcgccttttttctttgcttgctttctgttagattccgccgcaaatctatactgaataaaacggctaaaagacgaaccattatgaaaccatcatcttcaaactcacgcagcaaaggtcatgcaaaagcgcgtagaaaaacacgcgaggagctggatcaggaagctcgtgaccgtaagcgtcagaaaaaacgtcgtggtcatgcgccgggcagccgcgcagcgggtggtaacaccacgtcaggcagcaaaggccagaacgcaccaaaagatccacgtattggcagtaaaacccctattccattgggcgtggctgaaaaagtcaccaaacagcacaaaccgaagagtgagaaacctatgctttcaccgcaggcggagttggagttactggaaacggatgagcgtctggatgcgctgctggaacgtctggaagcaggcgaaactctgagcgccgaagagcaatcctgggtggatgccaaactggatcgtattgatgagttgatgcagaaacttggcctctcttatgacgatgacgaagaagaggaagaagacgagaagcaagaagacatgatgcgtctgctgcggggcaactaacggattgccgccgtgggccttcccgttctgctgataacccttccggttatatgttatctggtgtggttattcgttaaactacagcggttgtcgcggcgacaaaagtggctgcgcaaccggctgatgacccgaaacgggcatccgccggtacgccgtagccgccagagacgccatcggaaggagtgagcatgtctgtacagcaaatcgactgggatctggccctgatccagaaatataactattccgggccacgatacacctcgtacccgaccgcgctggagttttcagaagacttcggcgaacaggcgtttttacaagccgtggcgcgctatcctgagcgtccattatctctctacgtacatattccgttctgccataagctttgttacttctgcggttgcaataagattgttactcgccagcagcacaaggccgatcagtatctggacgcgctggagcaagaaatcgtccatcgtgcaccgctgttcgccgggcgtcacgtcagccaattgcactggggcggcggaacgccgacgtatctgaataaagcgcaaatcagccgtctgatgaagctgctgcgcgaaaacttccagttcaatgccgatgcggagatctcgatcgaagtcgatccgcgggaaatcgaactggatgtactcgatcatttacgcgccgaaggctttaatcggctgagcatgggcgtgcaggacttcaacaaagaagtgcaacgtctggttaaccgcgagcaggatgaagagttcatctttgcactgcttaaccatgcgcgtgagattggctttacctccaccaacatcgacctgatttacggcctgccgaaacagacgccggagagtttcgcctttaccctgaaacgcgtggcggagctgaaccccgatcgtctgagcgtctttaactacgcgcatttgccgaccatttttgctgctcagcgcaaaatcaaagatgctgacctgccgagtccgcagcaaaaactcgatatcctgcaggaaaccatcgccttcctgacacaatcgggctatcagtttatcggtatggatcactttgcccgtccggatgacgagctggcggtggcccagcgtgaaggcgtgctgcatcgtaacttccagggctacaccactcagggcgataccgatctgctggggatgggcgtttccgccatcagcatgattggcgactgctacgcgcagaaccagaaagagttgaagcagtactatcagcaagtggatgaacaaggcaatgcgctgtggcgtggtattgcgctaacgcgtgatgactgtattcgccgcgatgtgattaagtcgctcatctgcaacttccgtctggattactcccctattgagcaacagtgggatttgctcttcgctgattactttgcggaagatctcaagttgctcgccccgttagcaaaagatgggctggtggatgtggatgagaagggaatacaggtgacggcgaaaggtcgcttgctgatccgcaacatttgcatgtgctttgatacctatctgcgccagaaagcgcggatgcagcagttctctcgggtgatttaaattgtgaatggcgcttcgtttacaaagtagaaaacgaaagcgccatcaatgtgctgagaacaagattgcctgatgcgctacgcttatcaggcctgcaaaatctgttgaaattattgcttttgtaggccggataaggcgtttacgccgcatccggcaatcaacgcctgatgcgacgctggttgcgtcttatcaggcctacgactttctccgcatccggcgtaaacaacgagcttcagctaaacagccctatcatcgcggcacacagcacggcagcaacagcagtttgcggtgtgtggctgtcaactgcgccactcgataccagattaattattgattccagcataatgactctccccgttttccgggcaagatcatactgaacttatcggaacagtaaagcgcaaaataccagcaatttgcgctcaataatcaatctttacacacaagccgtgaatcactccatccccagctcttttaacttacgcgtcagggtgttgcgaccccagccaagtagccgcgccgcttcctgtttatgcccctgcgtatgtcgcagcgcggtggtcagtaacgtccgttccagctctggctgtgcttcggaaagcaggttttgatgaccggaacgcagcgctctgtctgcccactgtgctaacagcgttgcccaactgtccggctgcatgtgtgaagtgctttccggtacgtttgattcaaacagttcgccaggcaaatcctgaatcaacacttcctgcccggcggccatcaccgttagccagcgacaggtgttttccagctggcgcacgttgcctggccacgccagacgcgtcagcgcggcttcggtttccggatgcagcaacttcgcttctacgcccagctctcgcgcggcaacctgtaaaaaatggcgtgccagacggggaatatcttcccgacgttcgcgcagtggcggcagatgaacgcggatgacgttcaggcggtggaacagatcctcacggaacttgccttccagcacccgctgttcaagattctggtgagtggcagcgataatccgcacatctactttcaccggcgcatagccgccaacgcgataaaactgaccgtctgccagcacgcgcagcaaacgcgtttgcacatccagcggcatatcgccaatttcatcgagaaataatgtaccgccatcagcctgttcaaaacgcccctgacgaatggtattcgcgccggtaaatgcgcctttctcgtgaccaaacagttcggattcgatcaaatccttcgggatagccgccatattgagcgcgataaacggcgctttggctcgcggactgtggcgatgcagggcatgagcgaccagttctttaccggtgccggattcgccgttaatcagcacgctaatagaagaacgcgaaagccgaccgataatccggaacacgtcctgcatggctggcgcttcaccgatgatatcggtcgttgggccgttaagctgaacattacgcggctgctgctgttcctggtaatgactgatggcgcgctcaaccagcgccacggcttcgtcgatatcaaacggtttgggcagataatcaaatgccccttgttgataggcgctgacggcagcatccagatcggaatgtgcggtcataatgatgaccggaagcatcggatggcgctgtttaatctgcttgagcagcgccagcccgtccattcccggcatacggatatctgaaagcagcacatccggcgttttgctcgccagcgcctccagtacttccgcgccgttctcaaatgtcgtacaggttaaacccgctccagcgagcgcacgttcaagcacccaacggatggaactatcgtcatcgactacccagactatccctcgttgcataaacgtcacctttatttcctgataggcaggtaaaccgagaactcggtatgacctggccaactggtaaattcaattttgcctgaatgctgatcaatcaaattacgggcgatggataagccaagcccggtgccaccttcgcggccgctgaccatcgggtaaaacagcgtatcctgcaaatgaggcggaatgcccggcccgttatcttccacatcaatccgcgccgccagccgatagcgctcgccgtgtaaggtcagttgaaacgctgtgcgggtacgtagaatgatttcaccaccctccggccccagcgcctgtagcgcattgcgcacaatattcagcaagacctgttcaatttgatccgggtcgtgcgccagttccggcaggctggggtcgtaatcccgaatcaaccgcacgttgttcggcagttccatcgacaccagcgtcaccacgcgttcagccactttgtgaatactttcggtaatgcgcgtaccgggcagctgcggccccaacagacggtcgaccagatttcgcagccggtccgcctgttcgataatcactttggtatattcgagtagtgacgggtcaggtaatgctttgctgagcagctgcgccgcgccacgtaaaccgccaagcggatttttaatctcatgtgccaggccgcgcactaaatcacgggcagcaacctgctgggcgtgctgtagctgttcctgacttaagcggcgctggttatccatcggtgccatctccagcaggatcatgccgtccggcatacgctgagccgtcacagaaaggatatgcgagcgcccgtcgatgaccagcgtcacttcgttatcggtaaaaccttgccccgcctccagactttcttgcatcagctcgatatttaatgagaagtagctcaacagttccggtaacggcgtaccaaacaatttgcgggagctttgggcgagcagttgttgcgcggcggggttggcgtaatggatcgccagattgtcatcgattaacaaaatactgttaatcagcgagttgaggatctgcccagcatcgggctgcgtgcctgttgccataaagcagtctcctgaacaggttgcaccattttagtgcattatagctttttacggataaaaagcgcgaagcatcagagaattgacggagaaaaaagcccatgcagagatgggctgaaagtttccacggcaactaaatcccggcgttgttgcgccgggtagtacaacttcaactattagacgctgtagtacagctcaaactctaccggatgcggagtcatacgcacgcggtcatcttcttcgcgacgcagagcgatgtacgcatcgatcgcttcatccgtgaacacgccaccagctttcaggaactcgcggtccagatccagttcgttcagtgcttcttccagagagcctgcaacctgtgggatctctttcgcttcttctggcggcaggtcatacaggtttttgtccatggcttcgcccggatggatcttgttcttgatgccatcaagaccggccatcagcagggcagcaaagcacaggtacgggttagccgccgggtccgggaaacgtacttcgatacgacgtgctttcggagaagaaaccaccggaatacggatagacgcagaacggttacgcgcagagtaagccagcattaccggtgcttcgtagcccgggaccagacgcttgtaagagttggtggtcgggtttgccagggcgttaatcgctttagcgtgtttgattacgccgccaatgtagtacagtgcctgttcagacagacctgcgtatttgtcgccagcaaacaggttgacgccgtttttagacagcgacatgtggcagtgcataccggaaccgttatcaccgaacatcggttttggcataaaggtcgcggtcttaccgaaacggtgcgccacgttgtgcacgacatatttgtagatctgaatttcgtcagcttttttggtcatggtattgaagcgggtagccacttcgttctgacctgcggtagcgacttcgtggtgatgagcttcaactaccagacccatctgttccatcaccagacacatttcagaacgaatatcctgagctgagtctaccggcggaaccgggaagtaaccgcctttcactgccggacggtgacctttgttaccaccttcatattgggtggaggagttccatgcaccttcgatatcgtcgatagcaacgtgggaaccggagatagacgatccgaaacggatgtcatcgaacaggaagaattcaggttctggcccgaacagtacggtgtcggcaatgccagtagaacgcaggtaatcttcagcgcgcttcgcaatagagcgcgggtcacggtcatagccttgcagggtgccaggttcaaggatgtcgcaacggataatcagggtagaatcggcgaagaacgggtcaatcactgcggtggatgcgtctggcatcagcaccatatcggattcgttaatgcctttccagccgccaatcgaggagccgtcaaacattttgccttcttcgaagaattcggcattcacctgatgagcagggatagtgacgtgctgttctttacctttggtatcggtgaagcgcaaatcaacaaacttcacttcgtgctcgttcagcatcgtcagtacgtgttcagcggacatactttaactctcctggattggtcattgtcgtcgtggtaacgaaatctgcaattaaatgggccgtgtcgccgtaaaaaagataaagcgaaatctgtgccaacttttaaattgcccctaaaaggcgttatcatgcttaacatcgtgcaaaagggctgcaccatgatgtgaatgttgcaccaatatagtgcttcaatgggaacattaagcaccatattggtgcaatgacctttggataaccctttttatgctccgtgaaagcgatcacaaagggactctgcaatacttgtttgcggaggatgtttgtgatcctgttttgtagtgcgattaatccgtgtacaataacgcgctatttctaatgcctgaggcaaagttgtgatcgaaaaattgcgtaatatcgccatcatcgcgcacgtagaccatggtaaaaccaccctggtagacaagctgctccaacaatccggtacgttcgactctcgtgccgaaacccaagagcgcgtgatggactccaacgatttggagaaagagcgtgggattaccatcctcgcgaaaaacaccgctatcaaatggaatgattaccgtatcaacatcgttgataccccggggcacgccgacttcggtggtgaagttgaacgtgtaatgtccatggtagactcagtgctgctggtggttgacgcatttgacggcccgatgccgcaaacgcgcttcgtaaccaaaaaagcgtttgcttacggcctgaagccgattgttgttatcaacaaagttgaccgccctggcgcgcgtcctgattgggttgtggatcaggtattcgatctgttcgttaacctcgacgcgaccgacgagcagctggacttcccgatcgtttacgcttctgcgctgaacggtatcgcgggtctggaccacgaagatatggcggaagacatgaccccgctgtaccaggcgattgttgaccacgttcctgcgccggacgttgaccttgacggtccgttccagatgcagatttctcagctcgattacaacagctatgttggcgttatcggcattggccgcatcaagcgcggtaaagtgaagccgaaccagcaggttactatcatcgatagcgaaggcaaaacccgcaacgcgaaagtcggtaaagtgctgggccacctcggtctggaacgtatcgaaaccgatctggcggaagctggcgatatcgtggcgatcacgggccttggcgaactgaacatttctgacaccgtttgcgacacgcaaaacgttgaagcgctgccggcactctccgttgatgagccgaccgtttctatgttcttctgcgttaacacctcgccgttctgcggtaaagaaggtaagttcgtaacgtctcgtcagatcctggatcgtctgaacaaagaactggtacacaacgttgcgctgcgcgtagaagaaaccgaagacgccgatgcgttccgcgtttctggtcgtggcgaactgcacctgtctgttctgatcgaaaacatgcgtcgtgaaggtttcgaactggcggtatcccgtccgaaagtaatcttccgtgaaatcgacggtcgtaaacaagagccgtatgaaaacgtgacgctggacgttgaagaacagcatcagggttctgtgatgcaggcgctgggcgaacgtaaaggcgacctgaaaaacatgaatccagacggtaaaggccgcgtacgtctcgactacgtgatcccaagccgtggtctgattggcttccgttctgagttcatgaccatgacttccggtactggtctgctgtactccaccttcagccactacgacgacgtacgtccgggcgaagtgggtcagcgtcagaacggtgtactgatctctaacggtcagggtaaagcggtcgcgttcgcgctgttcggtctgcaggaccgtggtaagctgttcctcggtcacggtgcagaagtttacgaaggtcagattatcggtattcatagccgctctaacgacctgactgtaaactgcctgaccggtaagaaactgaccaacatgcgtgcttccggtactgacgaagccgttgttctggttccgcctatccgcatgactctggaacaagctctggagttcatcgatgatgacgaactggtagaagtgactccgacctctatccgtattcgtaaacgtcacctgacggaaaacgatcgtcgtcgcgccaaccgcgcaccgaaagacgattaatttcgttttttagtcataaaaaaacctgccagcgatggcaggtttttttttgcctgtcgtgagcgcacaccaatgcgagtatctcccttataagtctgtgattacgtcaatagagagctttgtcacaattatctgcaaagtcatacgccgttaattgctttcttttttggcgtaagcgtaagatgcctcatctggtttaaaccaaaaggattaaacaatggcggagaatcaatccaccgtagaaaatgcaaaagagaaactggatcggtggttgaaagatggcatcaccacgccgggtggaaaactcccttcagaaagagagctgggagaactgctgggcattaaacgtatgacgctgcgccaggcgttgttgaacctcgaggcagaatccaaaatcttccgtaaggatcgtaaagggtggttcgtgacccagccgcgatttaattacagtccagagctgtcggcgagctttcagcgggctgcaattgagcaagggcgggagccttcctgggggtttaccgagaaaagccgtaccagagatattcccgagacgctcgtgccactgattacagtgacaccatcaactgaactctatcgcatcaccggctggggagcgctggaaggacataaagttttctatcacgaaacatatattaatcctgaagttgccccgggttttattgaacaacttgaaaaccactcattttctgcagtctgggaaaagtgctaccaaaaagagacggtagtaaaaaaattgattttcaaacccgtcagaatgccgggcgatatcagcaagtatcttggcggttctgcgggtatgccagcgatcttaattgaaaagcatcgcgccgaccagcagggcaatattgtccagatagatattgaatattggcgatttgaggccgtagacctcatcattaatctgtaggtgttttatggtgacaataaataacgcaagaaagattctacaacgtgtcgacactcttcctctttatttacatgcttatgcctttcatttaaatatgcgactggaaagagtgttgcctgctgatttacttgatatcgcaagtgaaaataatctacgtggcgtcaaaatccatgttctggatggagagcgtttttctcttggtaatatggacgataaagaactctctgcctttggggataaagcccgccgtctgaaccttgatattcatattgaaaccagcgcctcagataaaaaatctattgacgaagccgtcgccatcgcgttgaaaactggggcatcctccgtacgtttttatccgcgttatgaaggtaatttgcgcgacgtattatcgattatcgctaacgacattgcctatgtacgagaaacgtatcaggacagcggcctgacttttacgatcgagcagcatgaagatttaaaaagtcatgagctggtgtcgctggtcaaagaaagtgagatggagtctctttccttactgtttgattttgcgaacatgatcaatgcaaatgagcatcccatcgacgctttaaaaacgatggcaccgcatattactcaggtccatatcaaagatgctttgatcgttaaagaacagggtggcctgggacataaagcctgtatttcaggtcagggggatatgcccttcaaagcgttattaacgcaccttatctgcctgggtgatgatgagccgcaggtgacggcatatggcctggaagaagaggttgattattatgcaccggcgttccgctttgaagacgaagatgataatccgtggatcccttatcgccagatgagtgaaacaccattgccagaaaatcatttactggatgcgcggttacgtaaagaaaaagaagatgcaattaatcagataaatcatgtgcgtaacgtactacaacaaatcaaacaagaggcaaaccatcttctgaacaactaataagttttaactcatacgcagttaataaaaccattccatatgaatggtcggtatcttattgcctttaaaacagtgattttaaaaatcgcttagggaatgttatgctcacgaaaaagaaatgggcgttatttagcctattaacactgtgtggcggtacaatttataaattaccgtcgctgaaagatgcgttttatatcccgatgcaggaatatttccatttgaccaatggtcaaattggtaatgctatgtcggtaaactcatttgtcaccacagtgggcttttttctgtctatttattttgccgataaactaccgcgcagatacaccatgtcattctcactcattgcgacaggattactgggtgtttatttgacgacaatgccggggtattggggcatcctctttgtctgggcgctatttggcgttacttgcgacatgatgaactggccggtcttgctcaagtcggtaagtcgattgggcaatagcgaacaacaaggtcggttgtttggcttcttcgaaacagggcgtggcattgtcgataccgtggtggcattttctgcgttggcagtatttacctggtttggcagtggcttattgggttttaaagcaggcatctggttctattcccttattgtgattgccgtaggcattatcattttctttgtcctgaatgacaaagaagaggcaccgtccgttgaggtgaaaaaagaagacggagcatcgcaaaacaccagtatgacctcggtgctgagagacaaaaccatctggcttatcgctttcaacgtcttcttcgtttacgcggtttactgtggcctaacattcttcattccattcctgaaaaacatctatctattgcccgttgctctggtgggggcttacggcatcattaaccaatactgtctgaaaatgattggaggaccgattggtggcatgatttcagataagatcctgaaatcgccgagtaaatatctatgctacacctttatcatcagtaccgctgcgctcgtactgttgattatgctgccgcacgaaagtatgccggtctatttagggatggcatgtacgctgggctttggcgctatagtcttcacacagcgagccgtattttttgcacctatcggcgaagcaaaaattgctgaaaataaaacaggcgcggcgatggcgttgggtagctttattggttacgccccggcgatgttctgcttcagtctgtatggctacattctggatttaaatccggggattattggctacaaaatcgtgtttggcattatggcctgcttcgcattctgtggtgcggtggtttccgtaatgctggttaagcgtattagccaacgtaagaaagagatgttggcggctgaagcttaattagtggccggatgtgcttaatccggccaacgaaaaccgtatcaaccgaagtttcaatttcaggatacttcttgctcggcaaccaccagttcaacattctcttcacttaacaactggcagaaagaattgggaggcggggcatcagtaaaaaaagccctgacattccgtgcattgccaattgaaacggcagcagacgcggtaaacttcgtatgatcggccactaacaatgtattccgcgcatgtttaatcatcgttctcgcgactaacgcttcattgacatcaaattccagtagggtgccgtcatgttcaatggcacctatactggtgattaaataatctgcgcggaagccttcaataaaatccacggctcctgggccgataatcccaccgttatgagcgcgtaaagtgcctcccggcaccatcacttcaatatcctgattcttataaagaatctgtgccacacgcaggctattagtgataatgcgtaaatcacgccggttgagtaatgccctggcaacggcttctacggttgtaccgatggtgataaagacggtacagcgttcgggaaggtaatcggcgactgcctcagcgatcgcccgtttctcggcggtgagcgaaagttcccgttgctcaaaagcggtattcatgacgctggagacgcgcccggcccctccatgatgacgggtgatcaagccctgctcactgagttttcggatatcccggcgcacggtttgcgttgaaacatccagcagttgtgccagttcttcaatattcatataaccgcgttctgcgattagatgaacgagttggtcatggcgtggattacctgtcacttcgatgatactcatgaatactcccttgcccctcctcggtagatgtttaccattttacgcataaagtgacaaaaatgattcggtttgctcacgattaggaatgccggcccgaccgccaggctgggtacatttcatcgcggcaaccgcactggcaaaacgaatagcctcttttgttggcattttttctgccaacgctaccgcgagtgcgccgtgaaaaacatcgcctgctccagtggtatcaaccacattgacagaaaatgcctcctgttgacacaaatgaccatcttcaatccacaacgatccttcagaacccagcgtaacatacactttacctgctgtttgtgtcgttgcctggaacaaaccttcttcaggtgactgcaggccagtcatgcgtttcagccctggtgttgagaacacggcgtgatcggcaagcgcgacaagtggagaaatatcctgcggtgtcatatcggcgtctaaaagcgttgtcacacccgcaaggcgcgctagcgagaatgctttttcagtaccgctatgccagcgaacatcggccagaatcagatcataacgagagaaatcgatcgcttctaaccattcggcatcagtaccgagatcaggacttggataattaacgataatccgttcgccatgctgatcaacgaggatcgctgattgcgacgaacgggcgttaggatatcggcggcaaaatgcggtattgacgccccaaccctcaagttctgcaagtaaggtatttccacaactgtcatcgccgatgcgaccgatgaaatcaacctccacgccaagctttgcgattgcaacagcggctgttgctgccgggccgccaccaatctcaagataatgatttgcctgatatttcccgccaccctccggcagagtgggcaaagaataaattctgtcctgaactgtgatacccacgcatgcaattctggtcatatttgtcttgtcctgtttaattttgtcgtctttggtcaatttaaatgacacaaatgatcaaattagtgatgcgtgtcgtgtttttgaacataaattacaaatatgctcaaaaacagacgaaaacgaattttcaattgtcattattttgtcaatgtcagacaggagagtattcatggcaaccattgcatttctcgggctggggcagatgggtagcccaatggctaacaatctattgcaaaaagggcattcattacaggtatttgatgtcaatacacaggccgtcgatgcgctagttacgcagggggccactgcggcacaaaccccagcggaagcggcagcaagcgctgaatttatcatcactatgcttcccaatggggacattgttcgacaggtgctgttgggggaaaaaggcgtctgtgaaactgtttcatctgacgcgttagtgattgatatgtcgactattcatcccttacagaccgatgcattaatacgggaattacaagaaaaaggcatcaatatgatggacgcccccgtgggcagaacgtcagtgaatgcgattgatggcacattgctgattttagcgggcggcactgatgagcagattgcgcgtgcacgcccgattctcatgtgcatgggtaatgagctggtcgaggctggtggcccaggaatggggatccgcgtgaagctaattaacaactatatgagcattgcgcttaatgcgctgtcctccgaagccgctgtgttatgtgagtcactgggattaaatcttgatgtcgcaattaaggtgatgagtggtacggcagcagggaaaggacattttacgaccacctggcctggcaaagtgctgaaaggcgatctttctcccgccttcatggtggacctggcattgaaagatctgcgtattgcagttgacgtcgctcggaaaacgggggcgccgctcaatatggggattgcagcagaaagttattacgccgcagcaagtcaagacggcaaagggcggcaggactggagcgccctgctaaatcaggttcgccagcaggctggtctttaattttatctattaacaggagtttctatgtcatcccacttcaccccatttacgctgaaagatatctcccgcccaggtggtggattcgccatgttagctgtcgatcagcgtgaggccatgcgcctgatgtttgcggcagcagggcagccaaaacccatcgccgacagtgtactcaccgattttaaagttgccgcgacccgaatcctttctccttatgcttctgccgttctggcggataaacaattttgtcttgaacaaatagtcgagcagggcgctgtggctaattcttgcggcctgattgtcgctgccgatctttttatcccaggtaatggcatcccggttgatagcgttgaaatagatatgtccgtcgacccgcataaagcccgtgaaatgggggctaaggcaatgaaattacttgtactctggcgtgaagatgaacccgcagaggaacgtctggcaatggttgataaatttgttcgtcgctgccgtagtgccgggctggttagcattattgaacctgtggtgcgtccacctcgtcgcggttgggactttgatcgtgaaagcgccattgttgccgccgccgcagagcttggtggaacagaggctgatctttacaaagccgagatgccattagggggcaaaggcgatgaaaaaaccttacttgccgcctgtcagcaacttaacgatcagatgaagatgccgtgggtaattctttcttctggcgttgatgccgatatttttggccgtgcagtaagtattgccatgaaaggtggtgcgtcgggcttcctggctggacgagcggtttgggcgtcggttgttggtgcacaagatccacaaaccatgctgcgcgatgtctccgttccacgcttgcaacggctggctgaaattgtcgatgaaggtatcgcgcaacgctaatcccctatggatatcgattctggagaataacaatggataaaattacccaggttttattttcagatattgggaaagtcaccactcaatatgttgaagtaccacaccagcaacttaaaccgcacgaagtacggattgcgcccgtgttctacgggatatgcggttcggatctgcatgttctgaaaggcggtcatccgtttgccaaaccgcctgtcgtccccggtcatgaaattgcagcgcgcgttacggaagtgggcagcgacgttaaaaatgtacagccgggcgatcatgttgtggtcgatcccatcatggcttgcatggaatgccgagcctgcaaagcaggacgttttaatctttgtgaaccaccgcaggttgctggtttccgcgcaccgggctttgctcgctcacaacacattgttcctgcgcgtaattgccatgtcgcaccagcctctttaccgctaaaagtgttggcctttgccgaaccggcggcttgtgctcgtcactgcgttaaccgaatgccgaaagcttctctggaaagcgtactggtgattggtgccggaacgataggcttatccatcgtgcaggcactgcgcattatgggggcaggtaagattaccgtgattgaacctgacgctgccaaacgcgcgctggcgttaaagctgggcgcagcagaagtttgggcaccaggtgagctggccgcagatgtgcgatttacgggggcgattgatgtcgttgcagcgcaggccacgcttaacgatgcatgtacccgtgtatatgccggaggcaccgtcgtgtgcatgggcgtaccaagtgggccgcgtgaaataccattaccgatgatgcaacgtttcgagcgtgacttgctcaactctggcatgtacatccctgaagatttcgatgctgttatcgaatggctggcggatgggcggtttgataccagtgaactggttaccgatttatttgccattgaggatgcagcggcggcattcgaacgcgcgcagcaaaatgattccataaaggtcatgctgcaatttgcgccggaatgattttctaaatctctgtctggcgctgcgtcacgccagcgccaccctacaacaattaaaaaggacactgcgatgagtcaaatcaccagtcctgcaacttattcaattagtcggccacaggacgtaattgatattgttaataagaactctgcaatcaacaccagtatcggcgttatttttattgctttgggcggcatattgattgatgcctaccaggcggcgatggtggggtttggtaataaatacattgccgctcaattcggcatttcgccgggtcttgctgcaaccgtcaatgcatcagtattaatcgccgcgttaattggcggtttattagcgaaccgagtaataaaccgctttgggcaaaagcgggcatttattattggcatggggctgtgcaccatcggtgctgcagcggtagctattgctcccagtatctggtgggtgctggtgtgccgcgtcatcatgggctttggtttaggcatcgacttccctttggcaaccaatgccgtggcagagcttcgtggttcaacgtcgaagaaaaccggcacgtcggtcaacctctggcaaatggcctggtatgtttcgacaaccgttgtttatttggtgcttttgccgctgcttctgtcgggtatcgctgaagaacaattgtggcgttacggaatattcatcggagctatttttgcagtcatcttcatgattttgcgttacttctttattggtgaatccgcaatgtgggccgcacgcgtcgggcgttaccaggaagcgtgcgacattctgggaaaacgttatggtgttcaggctcgcgttgcggcatcgggtacaacagaagcgaaattctcggaaaaagcagagaataaatacagtggtggatatggcatcttatttaatgatcgttaccgcaaacgcaccattcttggctgtgtcgtggcaaccatgcaggcgtggcaatataacgccgtaggtgtttatcttcctcttacgttggcgggaataataagtggcgggcttactggcgcgttaaccggttctgccgtcgtgaatgccctttgtggggtgacaggcgggatgatcggctcgtttattctccaacgactgggtactcgccgacagtcgatgtatggatttgctgttgtgaccttagcattgctgtcgttaggcgcactggcaacgactaatccctggctgtctttagggttattgggatcaattattttcttccattcagcgggtcctggtgggctgggcatgaccattgccacactctcttatcctcccgctattcgccctactggggtcggatttgcccgcgctattatgcgcacaggggcaattgcaggactcattttctggccgatgctgtggggtgcgttgaaaactgaagcgttttactggttggcaatcgtgccattcctgggattcctgacctgtgtattgattaattgggaaccactgggtgcaaatgttgatgctgaggacgcagaggttctggctgaattgaagaaataatttaatgcgcatcggtttaagccgatgcgcattaattcaaactgcccacgtttagtggttcgtatcccagatttctcgcctaccaggagaggaaaattatgtctgaaaagttacccgcaccgcgtgaagggctttccggtaaagccatgagacgtgtcgttatgggcagtttcgcaggcgcgttaatggaatggtatgacttctttatttttggcacggcagcaggactggtatttgcaccgctgttttatccagacagcgatccttttataggtcttatagcttcctttgcgacctttggtgtcggttttctgactcgtcctttaggtggcatcgtctttggtcattttggcgataaaatagggcgaaaaataacgcttatctggacgttggctattgtcggttgctccacatttttgattggttttattccgacgtatcaggaaattgggatctgggcaccgctcatattaatggtgctacgtttaattcagggctttggtcttggtggcgagtacggcggagcggcattgatgaccatagaatcagcgcccgaatcccgacgcggatttttaggttcactcccgcaaacggctgcgtctgtgggtattatgctggcaaccggtatttttgctctctgtaaccattttcttacttcggagcagtttctctcctggggatggcgcattccgttttggctttctgcggtgatgttgatcgttgggctgtttatccgcctgcataccgaagaaacgctggattttcaaaagcaaaaaacgacgaataataaagaaaagtccgttcctccgttgattgaattattcaaaaaacatccacgaaatattttattggcactgggtgcgaggctggcggaaagtgtctcctctaatattattaacgcctttggtattgtctatatttccagccaattagcattgtcgcgagatattcccctgacgggtatgttgattgcctcggcgatcggtattttcagttgtccattggttggatggttatcagatcgtataggtcaaaaaagtctgtatttgtcgggagcaggattttgtgtcctgttcgcgtttcctttcttcttattactggatagcaaaagtacgctcatcatctggtgcagtatgatcctcggctacaacttaggtccgacgatgatgtttgccgtgcagccaacacttttcacccgcatgttcggtaccaaagtacgatataccggcctttcttttgcttatcaattttccgcgattcttggcggactaagcccccttatcgcctcaagtttgctggcgctagggggaggaaaaccgtggtatgtcgctctgtttttatttgctgtctcagttctttcctttgtttgcgtctggctgattgagccgaccgatgaacaagaaaccgcttcttaccgctacatcagggaacaatctcatgaaaactgaacgaaaaaacgagcattacctggcgctacaacaggcgtttgacgcgccatggcctgggcctgtaggagagttagtgatgctggaaaaaggcaatattcacctgcagatttatccgcatgatggtgccaggataacctcgttaaaggcatttggttctgaagtattacgccaatggcagccgcagcgcagagcttttcagtatggctgtttcccaatggtgccgtgggcagggcgactggggaatgcgacgctgaatgctggtgggcaatgttattctttacccgccaataaaccaccacatgcgttgcatggtatggcttgttactcaacgtgggaaatcatcgacaaaacagcagattccctgactttacgtatgcccctggcttcaccgtggccctggcaaggggaagtgattcagacttttttgctggagaacgatgcgctggttttgcaactggaagtccattcatatgccgatacattcccggcctccgcaggctggcatccgtggtttgcgaaaaagctgactccgcaaaatacagaatcgttgcaggtgctttttgatgcggactggcaagaagaagcgggtagtgatgaactgccaactggaaatcgtatctctcctcaagttggtccctgggatgactgttttggtttttatgacggggtgaaggttaagttactgtggcctggtaaactcgcgatgaccatgacctcttctgcaaacagtctggtggtatttgataaacagcccgatgccacctgtattaacccgctgactcaggcacctaacgcaataaatctaacgccggaatttgtgacaccagataagccgctggtcatcgaaactcgttggcaatttacacctgaatcttaaccattcatctattgcgaaaaagccagtgaaattactctgctttttcgcaatcagcatcacaagattacccttattgccacatagccaaacccatcctttcccgctacagttaatttcttgtggcgcgaaaggaggcaaaaatgctctatatctttgatttaggtaatgtgattgtcgatatcgactttaaccgtgtgctgggagcctggagcgatttaacgcgtgttccactggctacgcttaagaagagtttccacatgggcgaggcgtttcatcagcatgagcgtggggaaattagcgacgaagcgtttgcagaggcactgtgtcatgagatggccctgccgctaagctatgagcagttctcccacggttggcaggcggtatttgttgcgctacgaccggaagtgatcgccatcatgcataaactgcgtgagcaggggcatcgcgtggtggtgctttccaatactaaccgcctgcatactaccttctggccggaggaatacccggaaatccgtgatgctgctgaccatatctatctgtcgcaagacttgggtatgcgcaaacctgaagcacgaatttatcagcatgttttgcaggcagaaggtttttcacccagcgatacggtctttttcgacgataacgccgataatatagaaggagctaatcggctaggcattactagtattctggtgaaagataaaaccaccatcccggactatttcgcgaaggtgttatgctaaaaaccattcaggacaaagccaggcatcgtacccgtccactatgggcctggctaaaactactctggcaacgcattgatgaggacaacatgacaaccctggcaggtaaccttgcctatgtgtcgttgctctcattagtgccgctggttgccgttgtttttgcgcttttcgccgcttttcccatgttttccgacgtcagcattcagttgcgtcactttatttttgccaactttctgcctgctactggcgatgttatccagcgatatatcgaacagtttgtcgccaattccaacaaaatgaccgccgtcggggcgtgcgggctgatcgtcacggcgttattgttgatgtactccatcgatagcgcgttgaataccatctggcgcagtaaacgagcgcgacccaaaatttactcgtttgccgtgtactggatgattttaacgctggggccgctgttggcaggggccagtctggcgatcagctcctatctgctctctctgcgctgggcgagcgatctcaatactgtcatcgataatgtgttgcgtatttttccgctgctgttgtcgtggatctctttctggctgctgtacagcatcgttcctaccatccgtgtacctaaccgcgacgcgattgtcggcgcgtttgtcgccgcgctcctgttcgaagcaggaaagaaaggtttcgcgctttatatcaccatgttcccatcatatcagctcatttacggtgtgctggcggtgatccccattctctttgtttgggtctactggacatggtgtatcgtcttgcttggcgcggaaattactgtcactctcggggaataccgcaaattaaaacaagctgctgaacaagaagaagacgacgaaccatgattgcattaattcaacgcgtaacccgtgccagcgtcaccgtggagggagaagtgacgggtgaaattggcgcgggacttttggtgttattgggtgtcgaaaaggatgacgacgaacagaaagcaaaccgtctgtgcgagcgtgtgctcggctaccgcatctttagcgatgccgaaggcaagatgaatctcaacgtgcaacaggcgggcggcagtgtactggtggtttcccagtttacccttgccgcagataccgaacgggggatgcgcccaagtttctccaaaggcgcatcaccggatcgcgcagaggcgttatatgactatttcgtcgaacgctgccgtcagcaagagatgaacacgcaaacaggacgcttcgctgcggatatgcaggtatcgctggtcaatgatggccccgtgacattctggttgcaggtatgagccagcttccagggttgtcacgggaaacaagagagagtatcgctatgtatcaccttcgggttccacaaacagaagaagaattagagcgttactatcagtttcgctgggaaatgttgcgtaagcccctgcatcaaccaaaaggttcggaacgcgacgcgtgggatgcgatggcgcatcaccagatggtcgtcgacgagcagggtaatctggtagcggtaggccgacagtatattaatgccgacaatgaagcgtccattcgctttatggccgttcatcccgacgtgcaggacaaagggttaggcacgctgatggcgatgaccctggagtcggtggcacgtcaggaaggcgttaagcgcgtgacctgtagcgcccgtgaagacgcggtggagtttttcgccaagctggggtttgttaatcagggtgaaatcaccacgccaaccaccacgccgattcgccattttttgatgattaaacccgtcgccactctggatgatattttgcatcgcggcgactggtgcgcgcagctgcaacaggcgtggtacgaacatatcccgctaagcgaaaaaatgggcgtgcgcattcagcaatataccgggcaaaaatttatcaccaccatgccggaaacaggcaatcagaatccgcatcacacgctgtttgccgggagtttattctcgctggcaacgctcactggttgggggcttatctggctgatgctgcgcgaacgccacctcggcggaacgattattctggcggatgcgcatatccgctatagcaaaccgattagcggaaaaccccatgcggtagccgaccttggtgccttaagtggcgatctcgaccgtctggcgcgcggacgaaaagcacgggtgcagatgcaagtagaaatctttggcgacgagacgccgggtgcagtgtttgaaggcacgtatatcgttctgcccgcgaagccatttggtccgtatgaagagggcggaaacgaagaagagtaggggcgttttacttgactgaaaaggttttcaatctgaaaaccttttctgggccctggtccggagttaccttcccgctctccaggcaacatcccgtagcgccgatcgcgcagcctcactgataccacctaactgaaaaaatccgtggataacgccaaggtagcgttggcaggtgcattgcactccttgccctgtcatgcggtgatacaacgcttcaccttcatcgcaaagtgggtcgtattcagcggtaatgatatgtacaggtggcaagccattgaaatcattgcgccaaatagggctggcttcaggatgcctgcgttcaatgcctggcaggtacatctcaaagccgctcagtaaagtgtcgcgtgtgatgatgtaatcgtgaccattgcgtatgtagctttcgaaatgcccagtcgcatcaagcataggataaattaagatgagttgtgctggttgccactcgccagcacgcttcaatcgcaaagcagttaccagcgccagatgcccgcccgcactgtcaccggcaagagttattcgttgtttatcaacgccgagtcgttcggcgtgttgccggactaattctgcacctcgttgtgcatcatcatgggcggcggggaaagtatgttccggtgccagccgatactggacggcaataatccgacattgcccgtaataggctaactggcgcagctggttgtcgtgagttgcgaacccgccgctaacaaaacagccaccgtagtaataaattatcgtcgggagtaatgtcggggcattcagcggtgacactattcgtaaggtcatcccttcaagttcgatagtctgaatatctacccgcgtttctgtctcacccgcaaggacagcgctggcgatatagccctctctgcgctgcgtaatactttgttggcgcgatgaggggcgacccgcagcgataaactcttcgactaactctgcaattcctttttccagtgccatagtagaactcatttttgctgtatgaatgtgggtcttcccctgttgtggtgggtggtacataattgagtgattttcaaacaccacacagtacctttatggtgtctctttttacatgagagggaattcttatgagtgtgccgcaaacaaaagctgaactgcttttagctattgataaaaattttagtaaattaattagttacctcaacacaatcccaccagaaattacttcagataaatcaatggacggacacgccaaaggaacggagatgagtgttcgtgatctcgtttcgtatctgcttggatggaatgctcttgttgtaaagtggatcgcttctgatgctaaaggtctgcctgtcgattttccggaaactggctataaatggaatcagcttggccttcttgctcaaaaattttactcagattacagtgagttaagttatgagttgttagtagctgaacttcagactgtaaaaaatgagattgtgaaccttattaatgatcgtaccgatgatattttgtatggaagaccatggtacacaaaatggacgatggggagaatgatctcatttaacacatcttcgccttacgccaacgctaatggaagattaagaaagtgggcaaaaaataataatatcagtttaaagtaagcttcagaatgaaattatatggacgaaaaatccctctatgcccatatccttaacctgactgcaccatggcaggttaaatcccttaccctcgatgaaaatgcaggttccgttactgttacagtcggaattgctgaaaatactcagttaacctgtccgacctgcaggaaatcctgttctgttcacgatcaccgacatcgtaaatggcgccaccttgatacctgccagttcatgacattagtagaagccgatgttccccgcgttatgtgcccggagcatggctgccagactctgcctgtaccgtgggcaggttccggcagtcggtacactctgctgttcgaatcgttcgtgctctcatggcttaaaatcagcaccgttgatgcggtcagaaaacaacttaaacttagctggaatgccgttgacggcatcatgacccgcgcggttaagcgaggcctgtcgcggattaaaaagcctttatcagtgcgtcatatgaatgtagacgaagtcgcctttaaaaaagggcataggtatataaccgtggtatctgatcgcgacgggcgggcactggcattaaccgatgatcgtggcacagagagtcttgccagctatctccgttcgcttactgacagtcagttgttggccatcaaaacactgtcgatggacatgaatgcgggctatataagagcagcgcgtatccatttacccaatgcggtcgagaaaatcgccttcgatcgcttccatgtggcgaagcaactgggcgaagtggttgataaaacccgccagaatgaacatccgcacctccctgttgaaagtcgtcgtcaggccaaaggtacccgcttcctgtggcagtacagcgacaaatggatgactgagtcccggcaggaaaagctgatgtggttgcgggaacagatgcaacagacaagccagtgctggacactgaaagagctggcaaaaaatatctgggatcgcccctggagcacagaacgcaggaatgactggttgcagtggatatcgctggcgtctgaatgtgatgtgccgatgatgaaaaacgcagcgaaaaccattaaaaaacggttatacggaatactgaatgcaatgcgtcatcgcgtctcgaatggaaatgcggaggcgctgaacagcaagatcagactgctgaggataaaggccaggggataccgaaaccgggaacgctttaaactgggagttatgttccactatgggaaactgaatatggcgtactgagtcttcccaccatgatcggggaagacccatgaatgtacagttttatacacccgtttttgctggatggatacagggaaattcacgggcgtgaaaaatctggaaagcgcctcgcaaatgtaaagacaaacccggcagagacgtggttttgctggagcactatcagtaagctagtggtttcaatggtacgtcaatgacgtacaaaaaggattgttactctaagccaatggcgtataattatgctcttcatcgaaacggaaatttttactgaagatgttcaaaaactgctgaacgacgatgaattcagtcgttttcagtttttcctggccttgaatcctgactatggtgaggtaatacctgaaactggtgggttaagaaaggttcgatgggtctcaggaggaaaggggaaacgtgctggtgtcagggttatttactttcatcaggttaaacattatgagatcagattactgcttatttatcgtaagggtattaaagatgatctgtctccccaggaaaaagcaatgctccggttgttaaatacgaggtggtaaatggataaggcactttttgagcggttgactcacagcatggcccagatgaatgaaattattgaaggaacgcgacagccttcacggacttttgaagttgatgctatgaaaatcaaagaaatacgccgcgcttcagggttgtcacaatctaaatttgccgatcttatttccgtaagcgtagacacgttgcgtaactgggagcaggggcgacgttcaccgaccgggcctgcaaaggctttgctgcgagcgattgccaatgatccgcaacatgtgctgcaagcacttaaccgttagaggcatggttatgccatacagaaagcaccagcattcagaactcctatgaaagcggcatagtgccgcctgctcaggagttttgctatgacccgtaatcgtgctgaacgtcgccatcatatggtgcgattaaaaaaaatccgctgtcgttatcgcactgcaggcgatggaagcaaaaaagcatcaggtatttgctttcgtactccctgtatttgttcttgttggatgtgtgggcatcgacgctatcataatggtccccgcgtatcggaaattcgtgcaaaagcacgctatgcgaattaagggaaaatgatgaactattttaaggaagcacatttttagaactcttaacaggagactaaaaatgtccacgtttaatacgcgtaaagatagggatcgtaatggtaaagcgaagccgcataagcattcagggatcccaacacttacaggtaaatggcgtcacccttcaatggattgttgggtaaactacagtacaccgggcgatcatgaatggaagcggctctatactacgcttcgccgtcgcgcagatgatcgacgccaatgtcatcgggtaatgcagggggatgatccggaaggaatcgtctggttcccggactgttatccacaaatttactactactaacaattaaagaccggttggtgcggcactgaccggtcgttatgaatggtagatttcaccttaaaccctggtgcggtaaagctgctgactttttcgggtacaccatcctgatgaagcaaatgaagacccaatcaaaaaatattcttgaatataaaatatttatagcatccataattcatccttattatttgttgtttcttttctgtagatgtgcccccgcttaattaaaagtaataaaccatttttgagtaacaattgaaataactgaaactgttacattatctttggatgccgtctcgcaaaaacaaaacaatatgaaaaaatccgctttcgttaattaactttccggcgtaattttcgcacatacattaatgagtaatatatgtaaggtggtggtaatggcgatgaatacggtttttcttcatttatcagaagaggcaattaaacggctgaacaagcttcggggatggcgtaaggtttcgcgctctgcaattttacgcgaagcggtagagcaatatctggagcggcagcaatttccggtgcgtaaggcaaaaggcggcaggcaaagggacgaggcagttggtgttgaagaactatgtaagcagcataaggaatgacaaaagtttttttattcatgaatataaaaaaccagatgcccttattctggtattaatacaaggctgttttacttgaacttataataactgcaactgttacatcatatctggaaaacgcctcgcgaaatacgagagattttgcgggaatagcaggtgtcgtcacaccctatgagctgtaatccgggcgaccagcgccacccggaaaacgtcagagattactccccttcacccggaaacaggaacgggttaatggaactacgggcatagccttcttgctccattcgcgcgtccagtaccagagaggcgaggtcatctgccacggcttcaactttcggttctttttcctgataaagaatcttcaggtaagtgccgcagtcatcgcagctttcggctttaatcgcggcctgttcgtcatccagcgaccagtaatgcagtttgccgctttgttcacagttgctgcattttacgcgcactacgtgccattcagtttcacacaggttgcagtgcaggtaacgcagaccctgagtggtgccaatttgcaccatgctggacaccggcatagagccacataccgggcaatattgacgttgttcgccgtattcagcgcgggctttgccggggatcagattagccatctgcgcccagtagagcgacagcgcagcccagataaacggcgctttatcgctgctgacggacgagaaatcagaggcaaacagtgcgctggccatatcttccagctcctgagtcgatgccttctccagattctcaatcactgccagcgccgggccgctcatttcaggtttcagctcagcaatcagcgccatcagcagcttttgccagtgcttatcacgcggcagaacgtgaatatccagcgggggcttgccttgtgcgctggcttctttaatgcgcgtggtcagatccatctccagcggatggtcgtacagcaccacttcctgggcgtgggcgataagcgcagcaaagcgcaggtaatcacccagcggattattttctgccagctcgcgcagacgctcggcgcggcggttgtataaattcttgagccgagggaacaataacggcggaatcatatccgccgtacgtttctcgctcgaacccagctcatcttgcgggattatgcgaatactcattcagctttcttttccgttgtcttgcggacctcacggtaccagcgcgggtgatgtttctttgcccatgcgctggtcacccatccttccaccatggcggtaatcgtgcctttcacccaaagggcggcgtagatatgcaccatgataaccacaattaacgccactgcggcaaatgaatgcagcattaacgcgaatcggatcaccgggattgagaaagcaggcgcaaaataaggacgccagataatcacgccgctcaccagcaacaggaccaggaaaataatcgccgcccagaaaacgcatttctgaccgaagttataacgcccggtgtcacctacttcctcgttgacgacgatcttacgaatattcttcgcccaaaagatatcatcccgattgattaggttgtgatgccagtaacggaaaaacatgatgatgaacgaggcaaacataaccacgccgacaaacgggtgcagaatgcgcgccagctgcggtgtgcccatgatttgcatcaaccagttgaaggacgggaacaaaaagcccagcccgctcaccgccgccaggatgaagcagaaggcggtgatccagtggttgatacgttccggcgcggtgtagcgcacgatggtgtcacgtcgtttcatttgcgctcctcgtctttctcttcgtgcagattattctcttcctcatccgcacggttcggaccgacacccacgtagtggaagatactggctgcgaaggtagccgcaaagccaacagctgcgagcggtttccagatgcctttccagaatttcacggtttcgctgatttccgggttctccggcaagccatgatacagatttggcttgtcagcatggtgcagcacgtacataacatgtgtaccaccgacgcctgccgggtcgtacaaacccgcattgtcgtaaccacgggttttcagctccgccacgcgctcgctcgccagcgttttcatcgactctttcgtaccgaagtgaatcgcgcccgttgggcaggtcttcacgcaggccggttcttgcccaaccaccacgcggtcaacgcacagcgtacatttgtagacgcggttgtcttccgggttgaggcgcggaatgtcgaacggacagcccgcaatgcaataaccgcagccgatgcactgctcggactggaagtcgacgataccgttggcatactgaataattgccccttccgccgggcacgctttcaggcagcctggatcggaacagtgcatacagccgtctttgcggatcagccattccagtttgtcgttctgctccacttccgagaatcgcatcaccgtccacgatttggcacttaaatcattggggttgtcgtacaccccaatgttattgccgacggtatcgcgaatgtcgttccactctgaacacgccacctgacaggctttacagccgatacaggtggtaacgtcgatgagtttcgccacttcttcctggaagtcccgcgcctgaggcgcgggggtcagaccgttagtcgcggaacgacgaatgatatcttgcgattgataagccatatgtcgtctccgttacaccttttccacattcacaaggaaggacttaaactccggcgtctgcgtgttcgcatcaccgacgaatggcgtcaacgtattggcaataaagccttttttcgcaacaccttcatagccccagtgaataggaataccgatggtatcgatatctttgccgtttgctttcagcgtgcgaatacgtttggtcactaccgctttggctttgatatagccacggttggaggagactttcacagtatcgccctgggcaatgccaagtttattcgccagcgactccccgatttccacaaactgctctggttgcaaaatcgcgttcaacagcgcgtgtttggtccagtagtggaagtgctcggtcagacgataggtggttccgacatacgggaacttatcggctttacctaatgcttcggcatcgtctttaaagatacgcgccgccggattcgagataacgtttggatgcagcgggttagttcccagcggcgtttcaaacggctcgtagtgttccgggaacggaccttccgccatcttatcgagggcaaacagacgtcccatgccttcctgctgcatgataaacggccctacgccgctgcccggaggcgctgcgctgtaatccggaatatcccagccggtccacttagtgccgtcccatttcagcaactgacgcttcggatcccacgggttaccctgcggatctgcggaggcgcggttatacagaatgcggcggttaagcggccatgcccatgcccagcccagcgtgttaccgaggccagacggatcggcgttatcacgacgcgccatctggttgccttccggcgtccagctaccggcgaaaatccagcagccacaggaggttgtgccgtcatcgcgcagttgggcgaacgagctaagttgttggcctttcttgacgataaccgcaccggttgccgggtcggtaatatcggccagcgctttgccgttgctctccattgccacttcttctgaagatggctcatgcggaatggcgtagttccaggtcatgttcagcacctggtccgggttcgcgccaccctgttcggcatacatcttgcgcaagcgcaggaagataccggagaggatctcgccatcagtcagcgcaatccccggggcgtccgcacctttccagtgccactgtaaccagcgacctgagttaacgatagaaccgttctcttccgcgaagcaggtcgatggtagacggaacacttcggtctggatcttcgacgagtcaacttcgttcagctcaccgtggttctgccagaagttagaggtttcagtgttcagcgggtcgatagtcacgaggaatttcagcttcgacagacagccgatcactttgtttttgttcgggaatgaggcaacagggttaaagccctggcagatatagccattgaccttgccttctttcatcatctcgaagtattgcaggacgtcgtagcctttatcccacttcggcaaccagtcaaagccccagctattttccgccgtcgctttatcaccaaagaatgccttcatcatagagacgaagaatttcgggtagttgccccagtagttaacctggccttccagcagtggtttcggcgtgttggcggtaaggtaagtttgcagatcggtctgcttctcgcttggcagcgtcatgtaacctggcagactctgcgacagtagccccaggtccgtcagcccctgaatattggagtgaccgcgcagggcgttaacgccgccgcctgccatccccatgttgccgagcagcagctggatcatcgccatcgtacgaatgttttgcgcaccaatggagtgttgcgtccagccgagggcgtagaggaacgacgctgttttatcgtgagcactggtttcggcgatgtattcgcagactttcaggaacgcgtcttttggcgtaccgcagatgttttcaaccacatctggcgtataacgggaaacgtgctgtttcagcaagttccacacgcaacgtggatgttgcagggtagtatcacgtttggcgaagccgttttcgtccagttcgtaagtccaggtggacttatcgtacttgcgtttttccgcgtcgtagccggtgaacaggccatcttcaaagccgtaatcctcacgcacgatcaggctggcgttggtataggcttcggtgtattcgcggttgaatttttcattgttcagcaggtacagcaatacgcctgacaggaaagcaatgtcagtaccggaacggataggggcatagtagtcagccaccgccgctgtacgtgtaaagcgaggatcgatcacaatcagcttcgcgccgttgtgaattttggcttccatcgcccagcggaacccgaccgggtgagcttcagcggcgttaccgcccatcaccacgacgaggttggcattcttgatgtcgacccagtggttggtcatcgcaccgcgaccaaatgttggagcaagacttgctaccgttggtccgtgtcagacacgcgcctggttgtcgaccgcgagcatacccagcgcgcgggagaatttttgcgttaaatagccggtttcgttgctcgacgcggaagcacacagcattccggtggagagccagcggttaacagtcgcgccttcggcgttttgcgcaatgtagttcgcatcgcggtcttctttcatcagtttggcgatgcgatcaaacgcctcttcccaactgatttgttgccatttatcagaacctggcgcacggtattccggaaacttcaggcggctttcggagtggatgaaatccaccaggccagcgcctttcggacaaagtgctccgcggttgaccgggtgatccgggtcaccttcgatatggaagatagatgctttggcgttttttgctccgtcaccgaggctgtacatcaacagcccacagcctacggaacaataggtgcaggtattacgggtttcgcgggtgcgcagcagtttatactgccgggtttccgcgagtgctacgctgggtgcaaaacccagtgccgctgccgtggtgcctgccataccgccagcgcagatcttaaagaactgccttctgctgacctgcatggattgctccttgtttcgacattgtcacgtcccatttacattcgcttgctgcgtgtgcagggagtgggagttatttttctttgcggaaggggccgcaaaggtccagaattggctcaatttccctccatccaggaagggtttgtagcagaataccataatgttggtgtgtgtgttcttatctggttaatagaaagtgaaaaaaacacagcaaaaagaaatcgagaatgtgacaaatatcacaggtgttcgtcaaattgagttatggcggcgtgatgatttacaacacccacggttagatgaggtggcggaagaagttcccgttgcgctggtctacaacggcatttcgcacgtggtgatgatggcgtcgcccaaagaccttgagtactttgcgctcggtttttcgctttccgaaggaattatcgaaagcccgcgcgatatcttcggcatggatgtcgttccttcctgtaatggcctggaagtacaaattgagctttccagccgccgctttatggggttgaaggagcgccgccgggcgctggcgggacgtacgggctgtggcgtatgcggtgtagaacagcttaacgatatcggtaaaccggtgcagccgctgccgttcacccagatgtttgatctcaacaaactggatgatgcattacgtcatctcaatgatttccagccagtggggcaactgactggttgtactcacgccgctgcctggatgttgccatctggcgaactggtcggcgggcatgaagacgtgggtcgccatgtggcgctggacaaactgttaggccgccggtcacaagaaggggaaagctggcagcaaggtgcggtgctggtttccagccgtgccagttatgaaatggtgcaaaagtcggcgatgtgcggcgtagagattttgtttgcggtgtctgccgcgaccacacttgctgtagaagtggctgagcgctgtaatctgacgctggtgggcttttgtaaaccgggtcgggcaacggtttatacccatccgcagcgtttgagcaattaattaaaataagtcctgtgatatatattaaattgcaggacttattcatttcgtgaattttgttattttttcataaacaaaacgcgtgtagtggcgttaacgcctgcgctgcaacctattgatggcgtggcggtgagttatattgatgctgccgtagcgttgggtaataccattaacgaaatggataaatattacacccaggaaaattataaagacgatgcgtttgcgaaagggaaaacattccactactactctctggcagtcatgatttcagcgaaacaaattaataacctgatatcgcaagataagtttgatgcagaagcggcaatgaagaaagtgtctgaactggaaacgctggtggcgcaagccaaagaagcggataaaagcggcatgaatttctcgtttattaattcggcaggccagtatcaactcgaggctaaaaaatacgttcgccgcatcagagataaagtcctgcactctgactgggataaagagcaacttcaggacgcaaactcaagctggatggccgaagactcatttccacgagcgttatgcgattacaacgaaatggtcgatgaaatattacagttaattgtaatcgcggggcgggtttgtgatgagcacggatatgtcacgaagtcgtaacaatataaagcagagtgaaggataaattttgtgaataaagtatcattatttaatgattttgtgaatgttaaaatgtctcagataatttgtttaagcgttatttatatttgtggcttatgagtcagcgtgaatcatatctaatattttttacgatatttagttaaaaacggcactattgttatattcctcacgttccaggaaatcagcggatttactcatattatgcggcgggatactatccatcggcctgctgaagttggattaaaaattcgaaagtgcacaccttatatttctctatatacgtattccttttggaaagcgtagggtctcctttatttcagggaacgtaaataatgaaaaaatcgacattatctttagccatcggtttattattggcatgtagtaccggtatggcaaaaacacagcatttaacgctggaacaacgcctggaagcggcagaaatgcgggcagcaaaagcagaggggcaggttaaacagcttcagacacaacaagccgccgagatccgcgaaattaaaaccgcacagggcaacacgccggtaaacggtcaatcaacgacggagtcagagaagaaaaacgccaccccgcctaatctcctgctttcagggtatggcgatttaaaaatctacggtgacgtagaatttaatatggatgcggaaagtaatcatggcctgctggcaatgaccaacgctgatgtgaatagcgatcccactaatgaacagtggaatctcaatggtcgtattctgttaggttttgatggtatgcgaaaactggataatggctatttcgctgggttctccgcacaaccgctgggggatatgcacggttcagtaaatatcgatgatgcggttttcttctttggcaaagaaaacgactggaaggtcaaagtaggccgttttgaagcctacgatatgttcccgctgaatcaggatacctttgttgaacattccggtaatactgcgaacgatctttatgacgatggcagcggttatatctatatgatgaaagagggccgcggacgttctaacgctggcggtaatttcctcgtcagcaaacaactcgataactggtattttgaattaaacacgttactggaagacggaacatctttatataacgacggtaattatcatggacgcgatatggaacagcagaaaaatgttgcttatctgcgtccggtaattgcctggtcgccgacggaagaattcaccgtttccgcagcgatggaagcgaatgtggtaaataatgcttatggttataccgatagcaagggtaattttgtcgatcagtccgatcgtaccggttatggcatgagtatgacctggaatggcctgaaaaccgatccggaaaatggcatcgtggttaatcttaataccgcctatttagatgctaataatgaaaaagatttcacggcagggattaacgcgctgtggaaacgtttcgagctgggttatatctatgcacataataagattgatgaatttagtggcgtggtttgtgataacgattgctggattgatgatgaaggaacatacaacattcacaccattcatgcgtcttatcagttcgctaatgtgatggatatggagaactttaatatttacctcggcacgtattactccattctggatagcgacggcgataagatacacggcgacgatagtgatgaccgttacggcgcacgcgttcgctttaaatacttcttctgatgaaagggcggtgctggatattttccggcaccgcaactcattaaggcaggtaaaacacttcttgcagttcgctactgactgggctgttatccgcattagcgggcataacgtcggtcatatatttccaccaacgttggcaaacatctgtactggcaaccgcattccaccgttcttcagattcaatctctaccgtggcaaatagcagattatgcgctttgtcgagatagatggcgtagttatgcgcaccgtgagatttcagcactgcttccagttccggccagatgggattatgccgacgctgatactcttcgtgggcgtcggggtttacctgcatgacaaaggctttgcggatcatgtttgctccttacagcgccagcgcactggcgagtggtgtaacgccgaaacgctggccgagcgctatcaactcttcacggctgatggtctgtttcatgccgcccatcgaataaaccttcactaatatttgtgctgatttttctgcggtgtcgattaaaccgaaggtttcatccagtgtcggtccggaaccgaacacaccgtggaagggccacaacatcagcgaatgtttttgcatctcttgtgcagttgcctggccgatttcgtccgtgccgggtaccatccacggcagaatgccaacgccatccgggaataccaccagacactcggtgctgccttcccacagttggcgagtgaagaccgcggtgtcgttttccagcacgtaggtgagagcgatcaggttagtggcgtggcagtgcatgatcacccgatctttgccgttggtggctttaatgcgctcgcagtgggaaaggaagtgagctggaagttcggaagtggggacggcttcgttggttaacccccaaagaatgtggtagcccgcgccgtcgctgtcgacttttacgatgcctaagttagccgcaggatcaagctggacgttacggaagaatttgccggagccggtgacaataaacggtgtatttgccagtaaaggcatgggctggctgagcgggatatagcgcggttgttggtgaaaattgtcgtgatatggtgcgatatcggcgtcatccaggcgcagcgtcaggttgccgccgttgcgctcgtcccagcctttcagccaggcatcggtggtggctttgatcattccctggacaaaccaggactgggttatgttttgcatgttctgtgttcctgttaattggacgtccgtgcctgttgccggatgtacgatctgtaggccggataaggcactcatgccgcatccggcaatcaatgcctgatgcgacgctgtcgcgtcttatcaggcctacaactgctgctgacccgtaggccggataaggcactcgtgccgcatccggcaatcaatgcctgatgcgacgctgtcgcgtcttatcaggcctacaactgttgctgacccgtaggccggataaggcactcgtgccgcatccggcaatcaatgcctgatgcgacgctgtcgcgtcttatcaggcctacaactattgccgacccgtaggccggataaggcacttgtgccgcatccggcaatcaatgcctgatgcgacgctgtcgcgtcttatcaggcctacaactattgccgacctgtaggccggataaggcacttgtgccgcatccggcagtgtttacccgcggcgactcaaaatttctttctcataagcccgcacgttctccagccattcgctacccgctggcgtatcgtgacgctgacaatacatttcccataccgcctgccacggcaacgatttctgctcttccagtagcgccagacgcgcagtgtaatcgcccgccgcttccagcttgcgcagctcagcggtaggttccagtaacgcacgtagcagggcttttttcatattgcgtgtaccaatgacccacgcggcaatgcggttgatagaggcatcgaagaagtcgaggccgatatgcacccggtcaaacagatcgtgacgaacaatctcactggcaatcgcctgggtttcatcatccagcagcactacgtgatcgctgtcccagcgaaccggacggctgacgtgcagtagcaactgcggcacatacagcatggcggcggaaatcttgtcggaaatcacttcagtcgggtggaaatgcccggcgtccaggcacagcgccgtctggcggctggtggcataccccatgtaaaactcattggagccaaccgtgtaactctccgcgccaatgccaaacaatttgctctcaacggcgtcgatatggtgcgccggatccagcttctcgctgatcacctcatccagagctgccagcagacgctggcgcggggcgagacggtcaacggtgatatctttcatgccatccgggatccagatgttcatcaccgacggtgtgccgagttgctcgccaaaataggctgaaacacggcggctggccttgcagtgatcaatccagaactggcgaatactgtcgtcggcatgggaaagcgtaaagccatcggcgcttagcggatgcgaaaaacaggaggggttaaaatccagaccgagctgattggttttcgcccattcaacccagtttttgaagtgctctggtttgatctggtcgcgcgcgacgggcgtgtctgattccagatagatggcatgtaaattaagccgtttcggccccggaataagccgcatagcctgttccagatcggcacgtagctcgctggcattacgcgctttgcccggataattaccagtagcctgaatcccaccggtcagcgaaccttccgggttttcaaaaccggaaacatcatcgccctgccagcagtgcattgaaacgggtaaacgatcaagttggcgcagtgcctcctcgacatcaatccctactgccgcgaaacgctgtttcgccagctcccaggcctgttccagttgagtggtcatgcgcaaagctcctttgtctgtcgtgtagagtgaatctgcgccacatagtgggcaatttcactgtcaggattaggggtaaaggtggtcagattcgcggtagtgctgacgacctgacggaaatcatccacattgttgagttcatccagcgtcattaactggatgccgatattgccgagcgtcgaggcttcaacaggcccggcgatcacccgaataccgcaggcatcggcacacagctggttgagcagcgtgttctggcagccgccgccgacaatatgcagttgcgagaaatcttcaccacgcagctgcgccagctcatgcaacacatcggcatacagcagcgccagactgtcgaaaatacagcgcgccagttcagcatcactttccgggatcggttgcgccgtttcccgacacgcagcctgaatttcgctgcacatctcgtcaggattaataaagcgatcgtcattgggattgatgatgaagcggcaggccggaagtgcctgtgttgcggcgataagcgccggaagatcgttgatttgccgctcctgaagcactcgctgaagcagccataagcccataatatttttcagcacccgatagcgaccttccgccccgccttcgttggtgatattggctgccagcgccgtgtcattggtaaatggcgtctggctttcgaagcccatcaatgaccaggtgccagaagagagataagcggcgcgtgaaccgtttaacggcgaggcgataaccgcgctggcggtatcatggctggcaacggcgaccaccggaatctcattaccctgtgggcaaatccagtgacctatgacattacccggatgcgtcgggcgaccaaaccaggctttgttggcaccgctccacgccagtagcgactcgtcccagtcgtcgctattgatattgaccagttgcgtggtcgtggcgttggtatattcccagttcatcttgccggtcaggcgataactaaagtaatccggtatcagcaaagcgtgagcaatgtgtggaataagttctggttgctgctctgtcagtgcacgtagctgatagatcgtattgaagggcagaaactggatgccgctacgttgataaatatcgcgtttgccgagttgttgttgtgcctgcgccattaggccattggtgcggctatcgcgataagcaacgggcaggcccacacgctgaccctgttggtcgagcagcacaaagtccacgccccaggtatcaatcccaatgctatcgatacgaatcccttcctcgcacaccttgtttaatccaaggcgaatggcactttccaggctatccacattccaggtgacataaccgttctggctatgcaggccattgttaaaacgatggatttcgcgcagcgtcaggctgcggcattcacgctcgtaacgcgccagcatcacgcgcccactggatgcgccgagatcgacggcgacacaattgcgaaaggtcataatgtgatcctgctgaatttcattacgaccagtctaaaaagcgcctgaattcgtgaccttctcgttactgacaggaaaatgggccattggcaaccagggaaagatgaacgtgatgatgttcacaatttgcttcattgtggtgatgtgatgctcaccgcattttctgaaaattcacgctgtatcttgaaaaatcgacgttttttacgtggttttccgtcgaaaatttaaggtaagaacctgacctcgtgattactatttcgccgtgttgacgacatcaggaggccagtatgaccgtattacatagtgtggatttttttccgtctggtaacgcgtccgtggcgatagaaccccggcttccgcaggcggattttcctgaacatcatcatgattttcatgaaattgtgattgtcgaacatggcacgggtattcatgtatttaatgggcagccctataccatcaccggtgggacggtctgtttcgtacgcgatcatgatcggcatctgtatgaacataccgataatctgtgtctgaccaatgtgctgtatcgctcgccggatcgatttcagtttctcgccgggctgaatcagttgctgccacaagagcaggatgggcagtatccgtctcactggcgtgttaactacagcgtattgcagcaggtgcgacagctggttgcacagatggaacagcaggaaggggaaaatgatttaccctcgaccgccagtcgcgagatcttatttatgcaattattgctcttgctgcgtaaaagcagtttgcaggagaacctggaaaacagcgcatcacgtctcaacttgcttctggcctggctggaggaccattttgccgatgaggtgaattgggacgctgtggcggatcaattttctctttcattgcgtacgctgcatcgccagcttaagcagcaaacggggctgacgcctcagcgttacctgaaccgcctgcgactgatgaaagcccgacatctgctacgccacagcgaggccagcgttactgacatcgcctatcgctgcggattcagcgacagtaaccacttttcgacgctttttcgccgagagtttaactggtcaccgcgtgatattcgtcagggacgggatggttttctgcaataacgcgaatcttctcaacgtatttgtacgccatattgcgaataatcaacttcgttctctggccgaggtagccacggtggcgcatcagttaaaacttctcaaagatgatttttttgccagcgaccagcaggcagtcgctgtggctgaccgttatccgcaagatgtctttgccgaacatacacatgatttttgtgagctggtgattgtctggcgcggtaatggtctgcatgtactcaacgatcgtccttatcgcattacccgtggcgatctcttttatattcatgctgacgataaacactcctacgcttccgttaacgatctggttttgcagaatattatttattgcccggagcggctgaagctgaatcttgactggcagggagcgattccgggatttagcgccagcgcagggcaaccacactggcgcttaggtagcgtggggatggcgcaggcgcggcaggttatcggtcagcttgagcatgaaagtagtcagcatgtgtcgtttgctaacgaaatggctgagttgctgttcgggcagttggtgatgttgctgaatcgccatcgttacaccagtgattcgttgccgccaacatccagcgaaacgttgctggataagctgattacccggctggcggctagcctgaaaagtccctttgcgctggataaattttgtgatgaggcatcgtgcagtgagcgcgttttgcgtcagcaatttcgtcagcagactggaatgaccatcaatcaatatctgcgacaggtcagagtgtgtcatgcgcaatatctcctccagcatagccgcctgttaatcagtgatatttcgaccgaatgtggctttgaagatagtaactatttttcggtggtgtttacccgggaaaccgggatgacgcccagccagtggcgtcatctcaattcgcagaaagattaattcgccatgccgatgccgacgatgttagcggcgacaataatcaccacacaaccgaggctcaacaccgttaccggacggcgtcctgcattgttccactctttcagcaccagcccgacgataccgccgcacaatacatagaagctcatatgcagcatccagctgatgtagtcatactgcgccggaatgcgggcgtggccccaggcatagaaaaagaattgcagataccacatcaacccgcccagtgctgagagtaacacattgtgaatgatcagcggttttgccagcgagaagtcggcttttagcgacaaatctttcacttttgccagacgaatgaagcagaagccgaggttgatgattgcgccgccgcccatgatgacaacatagcttggcagagcgacatacaggggatcgacgcccagcgcggcagcggcttcatgcatcggttttgcggcgttcatcgcaaaggacatcccggcagagaaaatgccgcacatcaccgccagcaccagcccttttttcagattgaactcttcggctttaatgcccatcttgcgctctttcaactgcccggcgcgagttacaatccctacgccaatcagcgccaccagaacgccgagcaacgtcatgcgtccgccttcggtattaatcagcacatcgaaattgccgttgataattggcgtcatcagcgtaccgacaatcaacgtaatgccaatggcgatgccaattcccatcgacatgccgagataacgcatggtcaggccgtagttgatattaccgatcccccacatagcgccgaacagaaaaacaggcagcagcgtagagagactaaacgagctgtaatacgcccagaaattcggtagtaacagggcgctgatggcccacggcaggataatccacgaaacaatcccaccgactgaccacatggtttcccatgaccatttttttacttttttgaacggagcgtaaaaacaggctgcactggccgcgccgatcaaatgccaaaatatccccatcgtaatcgcgttactcatcttcttatcctcatcattttttcgtcgcgtcacatctccgacgagatgagtgtaaaaattgagctgtcgattaacctttcgcctgttgccgccgctgccgatttactggcaatcacggcattaagtgggtgatttgcttcacatcttgggcattttcctgcaaaaccatacccttatgaaaagtgcggcattgataatcattttcaatatcatttaattaactataatgaaccaactgcttacgcggcattaacaatcggccgcccgacaacactggagatgaatatgagttataccctgccatccctgccgtatgcttacgatgccctggaaccgcacttcgataagcagaccatggaaatccaccacaccaaacaccatcagacttacgtcaacaacgccaacgcggcgctggaaaacctgccagaatttgccaacctgccggttgaagagctgatcaccaaactggaccagctgccagcagacaagaaaaccgtactgcgcaataacgctggtggtcacgctaaccacagtctgttctggaaaggtctgaaaaaaggcaccaccctgcagggcgacctgaaagcggctatcgaacgtgatttcggttccgttgataatttcaaagcagaatttgaaaaagcggcagcttcccgctttggttccggctgggcatggctggtgcaaaaaggcgataaactggcggtggtttctactgctaaccaggactctccactgatgggcgaagccatttctggcgcttccggcttcccgattctgggcctggatgtgtgggaacatgcttactatctgaaattccagaaccgccgtccggactacattaaagagttctggaacgtggtgaactgggacgaagcagcggcacgtttcgcggcgaaaaaataatcatttgccgcctgctgcaatgaggcgtttacgccgcattgcagcttaaaaaatgaaccatcgccaacggcggtggtttttttgtgatcaatttcaaaataaaaacaatgatccgataaaaataaaacagcgtttcaattggtgtggttttgatcacttttattgatcaaatgaatgtctatcttcgtttccatcaacactgatgctccgttgaggaatgacgcatcagcccttaaaaatatgccgacaggtgatggaaatgcagataaaacgctcgattgagaaaatcccgggggggatgatgctcgtcccgctattccttggcgcactgtgccacaccttctcgccgggggcggggaaatattttggatcattcaccaacgggatgattaccggtacggtgcccattctggcggtgtggtttttttgcatgggggcgtcaataaaattaagcgcgacgggaacggtactgcgtaaatccggtacgctggtggtaactaaaattgccgtcgcgtgggtggttgcggcaattgcctcgcgcattattccggaacatggtgttgaagttggattttttgccggactttcaacgttggcgctggtggcggcgatggatatgaccaacggcggactttacgcttccatcatgcagcagtacggcacaaaagaagaagctggggcatttgtgttgatgtcgttggagtccgggccgctcatgacgatgattattctgggcactgccgggattgcctcgtttgaaccgcatgttttcgtcggcgcagtattgccgttcctggtgggctttgccctggggaaccttgaccctgagttacgagaattttttagcaaagcggtgcagacgctgattccattctttgccttcgcactgggcaataccattgatttgactgtaattgcccagacaggtttgctggggatcctgttgggtgtggcagtaattatcgtgaccggtattccgttgattatcgccgataaattgattggcggtggcgatggcactgccggaattgccgcttccagttccgcaggggccgcggtagcgacacctgtgctgattgcagaaatggtgcctgcgtttaaacctatggctccggcagcaacttcgctggtagcgacggcggtcattgtgacttcgattctggtgccaattcttacctctatctggtcacgtaaagtcaaagccagagcggcgaaaatcgaaattttaggtacggtgaaataaaccaacttccttaatccccacagccggatgaactaacgttcgtccggttttcaattgcgtttctgcctggatacttaccgcgaaaacagcacgcctgacataaaataaatatggtctaatggggaaatttctcgtggagagggaacagatgcgatatccggttgatgtatacacaggcaagattcaggcttatcccgaaggcaaacccagcgcaattgccaaaatccaggttgatggtgagttgatgctgacggacctggggctggaaggtgacgaacaggcggagaaaaagatccacggcgggccagacagagcgctgtgtcattatcctcgtgagcattatctctactgggcgcgggaatttccggaacaggcggagctgtttgttgcgcctgcgtttggcgaaaatctctcaaccgacggtctgacggaaagtaatgtttatattggtgatattttccgctggggagaggcattaattcaggtcagccagccacgctcaccttgctataaactcaattaccattttgatatcagcgatatagcgcagttgatgcaaaacacgggtaaagtggggtggttgtatagcgtaattgcaccagggttggtatctgctgatgcgccactggagttggtttcccgtgtcagcgatgtgaccgtgcaggaggctgccgccatcgcatggcatatgccgtttgatgacgatcagtatcaccgtttactctccgccgcagggttatcgaaaagctggacgcgaacgatgcaaaagcgccgactgagcggcaagatcgaagatttttcccgccgattgtggggaaaataacccccggagtgtaggcctgataagacgctatcagcgtcgcatcaggcatcctgctcaaatgccggatgcggcgtaaacgccttatcctgcctacaaatgcggagtttaactccgcttatacagcggcaaccaaatcaccagccgtaaaccgcccagcgggctgtcttctgccttcacccagccacgatgctgctgaatggcggtttcaacaatcgccagccccaaacctgtaccgccagattcacgatcgcgtgcttcgtcggtccgatagaacggacggaaaatctgttcgcgatcttccgggctaacgccaggaccatcgtcgtccaccgtaatggtgataccgtctttatctaccgcaaagcccacttcaatcttcgtatgggaataacgcagagcattacgaacaatgttttccagcgcactttccagggcgttcgggttgccgtacagcggccacggcccaggtgggaagttaaccgtcaacgacttgcccatttgctcggcttcgaacgccgcgttatccagcacttcactccacaactggttggctttgatggtctcgctaaccagcgcatttttctgctgattacgtgacatcaccaacagatcgttgatcatgctgtccagacgttgcgcttcagtttcaatacgctccagttccttgctttcaccgctacgacggcgcagtaacgccgtacccagttgcagacgcgtcagcggggtgcgcagttcgtgagagatatcagaaagtagacgctgctgagaggtcatcatgcgctccagcgcggtgaccatctggttaaaactggcaccggcggcaaggaattcctgtggccccgcttccagttccgggtgctggcgtaagtttccctgggcaacttcatcggcagcgtttttcagcttacgcgccggttttgccagactccaggccaaccacaacagcagcggcgtactgaccagcatggtgacaatcagcagtaatagcgggcggtcaaacagtaagtttatgaaatcggattgagaactgctggccggacgaatcagataaagttggtaattatcttcgccatcacgcacggagaacggaccgaccagttccacgcggccatactttttcttctgcggatgatcggcgttatcggcctgaccaataaagttacgaatgatctgcatttcgctgcgttcagcgccgatcacgcggccttcggtggtcaccaataacaaacgctgtcctggcggtgcccacttatcaatcgcccggaacagacgccgccaccacattaaatcgttgggcggatcgttcgccagctccgcttcgacatgctgctcaatcatcagaccctgacgctgttcgctatccagaagctcggtcatctggcgtgaatcgagcttgggtaacatcaaaaccaacatcaacaccagcgccagcgtcagccagaagatggcgaagatgcgcgcggttaagctgcctatcatgaagcagaaaccatcagatagccgcgaccacgcagggttttaaaccacgggtgaccatctttacgatccggcagtttacgacgcaggttggaaatgtgcatatcgatagcgcggtcgaaaggcgtcaggcgcttgcccagcacttcctggcttaaatgctcacgggaaaccacctgacccagatgctgtgccagcaaatagagcagggtaaactcagtaccggttaactccagcgtttgcccgtcgaagctggcttcctggcgaccaggattgagacttaaggcatcaacttccagtgtcggtgaaccgttgtcgttgttttgctgttgttcgctccagtgcgaacggcgcaggatcgcgcgaatacgtgccaccagctcacgatcattaaacggtttcgggagatagtcatctgcgcccagctcaagcccgagaacgcgatcaagttcactgccgcgcgccgtcaacataatgacaggcgtctggtgtgtctggcgaagtgcttttaatgtgtcgataccatttttcttcggcatcattacatcaagcaaaagtaaatcaatgctgtcgtccagaagatcaagcgcctgttccccatcgtgggcaacaatcacgttgaagccttccatctcgagcagctcctttaatagggaagtcagctctcggtcatcatcaactaacaggattttattcattgtttaaatacctccgaggcagaaattacgtcatcagacgtcgctaatccatgactttacgttgttttacaccccctgacgcatgtttgcagcctgaatcgtaaactctctatcgttgaatcgcgacagaaagattttgggagcaaatgatgcgcatagttaccgctgccgtcatggcctcaacgctggcagtcagttcattaagccacgctgctgaagtcggttcaggcgataactggcatccgggtgaagaacttacgcagcgcagtacgcagagccatatgttcgacggcataagtttaaccgaacatcagcgtcagcagatgcgagatcttatgcaacaggcccggcacgaacagcctcctgttaatgttagcgaactggagacaatgcatcgccttgtcaccgcagaaaattttgatgaaaacgctgtgcgcgcacaggcagaaaaaatggcgaatgagcaaatagctcgtcaggttgagatggcaaaagtccgcaaccaaatgtatcgcctgttaacgccggagcagcaagcggttttaaacgagaaacatcaacaacgaatggagcagttgcgcgacgtgacgcaatggcaaaaaagttcatcgttgaagctattgagtagtagcaactcacgttcccagtagtaaaccctgttttccttgccatagacaccatccctgtcttcccccacatgatgtgggggttttttttatcctcaatttgcctgctgcttaatgcattgcagatgatttgcttccgttatactaccgtcagttgatagcgggagtatttatgaatcaatcttatggacggctggtcagtcgggcggcgattgctgcgacggcgatggcttcgctgctattgctgattaaaatttttgcatggtggtataccgggtcggtgagtattctcgccgcgctggtggattcgctggtggatatcggcgcgtcgttgacgaatttactggtggtgcgatattccctgcaacctgccgacgataatcactcgtttggtcacggtaaagctgagtccctcgcggcgctggcgcaaagtatgtttatctccggttcggcactattcctgtttttgacgggtattcaacatctggtatctccaacaccgatgacagatccaggcgtcggggttatcgtgacaattgtggcgctaatttgtacgattatccttgtctcgtttcagcgttgggtggtgcgccggacgcaaagccaggcggtgcgggctgatatgctacattaccagtctgatgttatgatgaacggcgcaattctgctggcgctggggttgtcctggtacggctggcatcgcgccgatgctctgtttgcattggggatcggcatctatattttatatagcgcgttacgcatgggatatgaggcggtacagtcattactggatcgcgcattgcctgatgaggaacggcaagaaattattgatatcgtgacttcctggccgggtgttagcggcgctcacgatcttcgcacgcggcagtcagggccgacccgctttattcagattcatttggaaatggaagactctctgcctttggttcaggcacatatggtggcggatcaggtagagcaggctattttacggcgttttccgggatcggatgtgattatccatcaggacccctgttccgtcgtacccagggagggtaaacggtctatgctttcataatcagtataaaagagagccagacccgcattttgtgtataaaataccgccatttggcctgacctgaatcaattcagcaggaagtgattgttatactatttgcacattcgttggatcacttcgatgtgcaagaagacttccggcaacagatttcattttgcattccaaagttcagaggtagtcatgattaagaaaatcggtgtgttgacaagcggcggtgatgcgccaggcatgaacgccgcaattcgcggggttgttcgttctgcgctgacagaaggtctggaagtaatgggcatttatgacggctatctgggtctgtatgaagaccgtatggtacagctagaccgttacagcgtttctgacatgatcaaccgtggtggtacgttcctcggttctgcgcgtttcccggaattccgcgacgagaacatccgcgccgtggctatcgaaaacctgaaaaaacgtgggatcgacgcgctggtggttatcggcggtgacggttcctacatgggtgcaatgcgtctgaccgaaatgggcttcccgtgcatcggcctgccgggcactatcgacaacgacatcaaaggcactgactacactatcggtttcttcactgcgctgagcaccgttgtagaagcgatcgaccgtctgcgtgacacctcttcttctcaccagcgtatttccgtggtggaagtgatgggccgttattgtggcgatctgacgttggctgcggctattgccggcggctgtgaattcgttgtggttccggaagttgaattcagccgtgaagacctggtaaacgaaatcaaagcgggtatcgcgaaaggtaaaaaacacgcgatcgtggcgattaccgaacatatgtgtgatgttgacgaactggcgcatttcatcgagaaagaaaccggtcgtgaaacccgcgcaactgtgctgggccacatccagcgcggtggttctccggtgccttacgaccgtattctggcttcccgtatgggcgcttacgctatcgagctgctgctggcaggttacggtggtcgttgcgtaggtatccagaacgaacagctggttcaccacgacatcatcgacgctatcgaaaacatgaagcgtccgttcaaaggcgactggctggactgcgcgaaaaaactgtattaatgatttcggaaaaaggcagattcctttagcctgaaaccgatgacagaagcaaaaaggcctgatgcgcttcgcttatcaggcctacatgaattctgtaatctattgaatttgcaaacttttgtaggccggataaggcgtttgtgccgcatccggcatggacaaagcgcactttgtcagcaatatgaggcggatttcttccgcctttttaatcccccaacatatactcgcaagttatagccaatctttttttattctttaatgtttggtcaaccttctggcacgctttgctcatcacaacacaacataagagagtcgggcgatgaaaaagtggggcgtagggttaacatttttgctggcggcaaccagcgttatggcaaaggatattcagcttcttaacgtttcatatgatccaacgcgcgaattgtacgaacagtacaacaaggcattcagcgcccactggaaacagcaaactggcgataacgtggtgattcgtcagtcacacggtggttcaggcaaacaagcgacgtcggtaatcaacggtattgaagctgatgttgtcactctggctctggcctatgacgtggacgcaattgcggaacgcgggcggattgataaagagtggatcaaacgtctgccggataattccgcaccgtacacttccaccattgttttcctggtacgtaagggtaatccgaagcagatccatgactggaacgatctgattaaaccgggtgtttcggtgatcacgcctaatccgaaaagctctggtggcgcgcgctggaattacctggcagcctggggctacgcgctgcatcacaacaacaacgatcaggcaaaagcacaggattttgttcgggcactgtataaaaacgtcgaagttctggattctggcgcgcgcggatccactaacacttttgtcgagcgcggaattggcgatgtactgattgcctgggaaaatgaagctctgctggcagcgaatgaactggggaaagataaattcgaaatcgtcacgccgagtgagtctatcctcgcagagccaaccgtgtcggtggtcaataaagtggtcgagaaaaaaggcaccaaagaggtggcggaagcctacctgaaatatctctactcgccagaaggtcaggaaattgcagcgaaaaactactaccgtccgcgcgacgctgaggtagcgaaaaagtacgaaaatgcgtttccaaaattgaagttattcaccattgatgaagagttcggcggctggacgaaagcgcaaaaagagcattttgctaacggcggtacgttcgatcagatcagcaaacgctgatttccccaggataattatcaagcccggtggtttctcgcgactgggttttttatttgtcacgattttgcgttacccttgcatctctttgaggtacagggaaaaaaagatgaaaaaagcgggtcttctttttttggtgatgatagttatcgccgttgtggctgccggtattggttactggaaattaaccggtgaagagtcagacacgttacgtaagattgttcttgagcaatgtttgcccaaccagcaggaaaaccaaaacccgtcgccatgtgcggaagtcaaacccaacgccggatacgtggttttaaaagatcgtcatggcccactgcaatatctgttgatgccaacgtaccgtattaacggtactgaaagcccattgttgaccgatccgtcaacgcctaattttttctggttagcctggcaggcgcgtgattttatgagccaaaaatacggccagcctgttcccgatcgcgcggtatctctggcgatcaactcccgcaccgggcgtacgcaaaaccattttcatattcatatttcttgtattcgtcctgatgtgcgcgaacagctggataacaatctggcgaacatcagtagccgctggttgccactgccaggtggtttgcgtgggcatgagtacctggcgcgtcgggtaacggaaagcgaactggtacaacgcagcccatttatgatgctggcggaagaagtgcctgaggcgcgggaacatatgggaagctacgggctggcgatggtacggcagagtgataactcatttgtattgctggcgacacaacgaaatctactgacgctgaaccgtgcttcagccgaagaaatccaggatcatcagtgtgagattttgcgttaaggcgaggagtttaggaaagtaagtgccggatatgaaatccggcacctgtcagacttaagcctgtttagccgcttctgcagctttaacgatcacggcgaaagcgtcagctttcagagaagcaccgccaaccagcgcgccgtcgatgtctggctgagcaaacagttctgcagcgttagacgcgtttacagagccgccgtactgaatgatcacttgttcagcgatgttagcgtcaactttagcaatgtggtcacggatgaatttgtgaacagcctgtgcctgagccggagttgcagatttgccagtaccgattgcccatacaggttcgtaagcgataaccgcaccttcgaatgccgcagcaccctgagttttcagtaccgcgtcgatctgacgtgcacaaacttcttcagttttgcccgcttcgttttccgcttcggtttcaccgatgcacagaaccggagtcagtccctgctctttcagcaccgcgaattttttcgcgatcagttcgtcagattctttgtggtaagtacgacgttcagagtggccgatgatgatgtactgtgcgccgatgtctttcagcatagcagcagaggtttcaccggtgaatgcgccggacaggttcaggtccacgttttgcgcacccagcatgatgtggctgccttcagcttcacgcttcgccatatcgatgtacatttccggtggtgcgattgcaaccgcacagccagcaacacctgccagctctttacgcaggttagataccagctcgtgaaccatgtggcggctgccgttcagtttccagttacccatcactaaaggatgtcgcattttaattctccacgcttataagcgaataaaggaagatggccgccccgcagggcagcaggtctgtgaaacagtatagagattcatcggcacaaaggctttgctttttgtcatttattcaaaccttcaagcgattcagatagcgccagcttaatcggttcaacagcgaaggtcagccccttttcgccgttgtccgcgacaacataacgcagtgcaccttctgtctcggtgtaataacgtttgtttttccccgccgttagtagcgactgcagttttttctgactttgagttttggtcattaatggggtgagtgtgcggatcaccgctgccatgtatgcctgagctttcgctttcgcggctttttgctctggcccctggatgggtagccaggttatttgaatgcttttgatttttaaggtaccgcgctccagcgcagtagaagcatacaagttctcgttaattttacttgctgcacgagtgagattggctttgtcgggactgctgtcgatggcacgaaattcgttcagtggcaggctgggattctggctgttaaagtcttctcgaaactggctgatggagagatcgaaagtaggggctccagccagcagataaggcgcggtcgttgccgtatctggtgtttgtgcatgcgccgttgttgtaacggttaatgcagaacataagagaaaaaacagcgtacaccctggcttcattgacagtaccttttgttatgactggctccgattaaaacgatatctgtcgcccttgtcaaaagggtagaatcctggaaaagacaaccatcaaggaacttacatgaccatacagcaatggttattctcatttaaagggcgtattggacgccgtgatttctggatttggataggcctgtggttcgcaggcatgctggtgcttttctcactggcgggtaaaaatttactcgatattcagaccgcggcgttttgccttgtgtgctcgctttggccaacagcggcagtaaccgttaagcgcttgcatgatcgcgggcgttccggcgcatgggcatttctgatgattgtggcgtggatgctgctggcgggtaactgggcgattttaccgggtgtctggcaatgggcggtggggcgttttgtcccgacgttgattctggtgatgatgcttatcgatcttggtgcgtttgttggcacacaaggcgaaaataaatatggtaaagatacccaggatgtgaagtataaagccgacaataaatcaagtaattaacctttaatatatctcttatcgctatttttttccgggattgttatttccacgatgcaagtgacaatgcccggaaaatccttctgaactcttcaccttaagcaatatcaaaaaaaatggtaatccataagatcattacttgtttgttcttcctttaacggcgcattattcttaagtcgtaatcgacagagaggcgaatatacagaggtgccctatgaaagatgtcgtagataaatgcagtactaaaggatgtgcgattgatatcggtacggtgattgataacgacaactgtaccagtaagttttcgcgcttttttgccacccgcgaagaagcagagtcctttatgaccaaactgaaagagcttgccgccgctgcatcctctgcagatgaaggggccagcgtggcctataagattaaggatctggaagggcaagttgagcttgatgcggccttcaccttctcatgccaggccgagatgattatttttgagttatcactgcgttcgttagcttgatggagttgctttagaaggagttaaatatggcttataaacacattggcgtggcaatttccgggaatgaagaagatgccttactggtgaataaagccctggagctcgccagacataatgacgctcacctgacgttaattcatattgatgatggcttaagcgagttgtatccgggtatctacttccctgcaacagaagatattcttcaattgttgaagaataagtcggataacaagctgtataaactgacgaaaaatattcaatggccgaagacaaaactgcgtattgaacgcggagaaatgccggaaacactgctggaaattatgcaaaaagagcagtgcgacctccttgtctgtggtcatcaccactcatttatcaaccgtttgatgccggcatatcgcgggatgatcaataagttgagtgcggatctcttgatcgtgccgtttatcgacaagtaaccgcttaccagtaatgctccgctgtcatatggcccggtcggcgacgtaaatgtttcgtcatctgccgggtctccttcagcaactgttgtgtatcgcgcaccatctgtggattgccgcacagcatcacatggctggtttctttattcatcggcaggccaaccgcgctttccagttcaccactttcaattaacgccggtaatcgcccagtgagcgaacccgcagccgtttcccgactgaccaccgtctgaatgcgcagtttcccctcgtagcgtttttccagttcctgcatcagaggtagatagcttaagtcggcggcatatcgtgcggcgtgaaccagcaccatgtttttgaagcgttctaaatctttgcccaattgcagaatcgataaataagggccaatcgctgtaccggttgccagcatccatagcgtttcgcaatctggtacttcatccagcacaaagaagccagcggcttcgctaaccacctgcacttcatcgcccggtttcagtgccgccagtcgtggacttaatttgccatcggggacggtgaccaggtaaaactccagatccggattatcgggcgagttaacataggagtaggcgcgctgaacgcgttcgccttcaatttcaaggccaagtttggtgaattgcccggcggtaaacggaagcacgggagcgtgaacggtgagactaaacagggcgtcggtccagttctgcactttagtgactttgcctgttacccaatcagccatgtttttctcctgttttgattgacttgccttatcttcgttctccgaacaaaaaaattccagtcccgaaggactggaaggctcaatcgatcaaatcaatcagaggatgtgcacctgcatttccgggtctttacgatccagatagtggatggactgaatgcgacgaatggtgcgtgatttaccacggatcagcagcgtttcggtggtggcgatattgcctttgcggctaataccttccagcagatcgcctttggtaataccggtggcagagaagatgacgttgtcgctgcgcgccatatcgcccaaacgcaatactttaccggcttcgatgcccatcgctttgcagcgtgccagctcctgctcgccaatgcgacgattctcttcgttgtcgcctttgacgtcatgacgcgccagcagacgaccgttcatgtcaccatctaatgcgcggatcaccgccgcagaaaccacgccttccggcgcgccgccaatgccgtacagtacatcgacttcactgtccggcatacaggtgagaattgaggccgccacatcgccatccggaatagcaaatacgcgtacgccgagttgttgcatttctgcgataacggcatcgtggcgcggttttgccagaatcgttaccgtcagttcgctcaacggtttgccgagcgccgccgcaacattgcgcaggttatccgccagcggcaggttcagatcaatggtgcctttggctcccggtccgacgatcagcttctccatatacatatctggcgcgttgaggaaacagcctttatcgcctactgccagcaccgccagcgcgttagcctggcccatcgccgtcatgcgcgtgccttcaatcggatcaacagcaatatctaccgcgtcgccgcgaccagtaccgactttttcaccaatgtagagcatcggtgcttcgtcgatttcaccttcaccaatgacgatggtgccgtcaatgttgacctggttgagcataatacgcatggcgtttaccgccgcgccgtccgcggtgtttttatcgccgcgtcctaaccatttgtagccagccagcgctgctgattcggtgacgcgggaaaattcgatggcaagttctcgtctcatagcaaactctaagcagtaaggaatggcgcgaagtgtagcacaggggaagggcgggattattgatgtgtgcggggttgcccccgcacggtttcagagtctgtgtgatgccggatgtgtatccgactcgtaggcctgataagacgcgcaagcgtcgcatcaggcaatcattattactcgtcgtgttcttcccatgccatcgcgcgtttgaccgcttttttccagcctgcgtaacggtaattacgctcagtggtttcgatgccaggacggaactcgcgttcaatcaccgctttctcttgcagctcgtcaagattctgccagaagccaaccgccagaccagcaagataggccgcacccaaagcggtgacttcgcgcacttccgggcgctcaacgcgcgtaccgagaatatcggactggaactgcatcaggaaattgtttgccaccgcaccgccgtccacgcgcagcgcgtgcagacgaataccggagtcggcctgcattgcttccagcacgtcacgcgtctgataagcaatagactccagcgtcgcgcgtataatgtggttagcgttcaccccacgagtcagaccgaaaatcgccccgcgtgcatacggatcccagtatggcgcacccagcccggtaaaggccggaaccacatacacaccattggtgttttgcactttggtggcgaaatattcggaatcgtaggcgtcgttaatcaacttcatctcatcgcgcagccactgaatggacgcgcccgccataaacactgcaccttccagcgcatagttcacttcgccagtcgggccgcaggcgatggtggtcagcaggccgttttctgattttaccgctttctcgccagtgttcatcagcataaagcagccagtgccataggtgttcttcgccattccttctttcacgcacaactgaccaaacagcgccgcctgctggtcaccggcgatcccggagattggaatacgcgtgccgcctttgccgccaatgttagtctgaccgtatacttcggaagaacgacgcacttctggcagcatctcgcgtggaatatccagcacctccagcattttgtcgtcccagtccagactatggatgttaaacaacatggtacgagaggcgttggtgtaatcggtcacatggacacggccctgagtcattttccagataagccacgtatcaaccgtaccaaacagcaattcaccacgacgcgcacgctcgcgagagccttccacatggtcgaggatccacttcactttggtgccagagaagtacgggtcaatcaccagaccggtgttgttacgaatgtactcttccatgccatcgcgtttgagatgttcgcagatttctgcggtacgacggcactgccagacaatggcgttatagataggcttgccggtttctttttcccagacaatagtggtttcacgctggttcgtaataccgatagctgcaatctgatcggaactgatatcggctttcgccagcacttctaccagcgtggagctttgggtggcccagatttccattgggtcgtgttctacccagcctggttttgggtagatttgctcaaattcgcgctgcgacacgctaatgatattggcatcgtgatccattacgaccgcgcgggagctggtggtgccctggtcgagcgcaacgatatattttttttcagtcatgtttaattgtcccgtagtcatattacagcgaagctttttgttctgaaggagttgtggtctccttttcttccacaacacagatatcgcaaggcaaatggcgaccaatcagtttgcggtaggcaaatgcacctacaatcgcgccaacgatagggccaaaaagcggcaccaggaagtaaggaatgtctctgccgccggtaaaggcgacattgccccagcccgccagccaggcaaagactttcggaccgaagtcacgcgctgggttcatggcaaaacccgtcaatgggcccatagatgcgccaatgaccgcaatcagtagaccaatcagcaagggagccaaagggccgcgtggtacaccgttgccatcgtccgttaacgccaggatcagccccatcagaatagcggtaatcaccatctcaactgcgaaagcctgcacaaaattgatatgaggattagggtaagtagagaaagtgccagccagatcaacactttcaacgctgccgcgaacaatgtgatgagtctgctcgaagtcgaaaaataaattgtagtaaagcccgtaaactaaagccgcagcacagaaagcgccggcaacttgtgaaacgataaaaggaataactttgcgcttgtcgaaacaggcaaacagccacaatgcaatggtaacagcgggattaagatgcgcgccggaaacccctgcggtcaggtagatggccattgccacccccagtccccaaatgacactgatttcccactgaccaaaagacgcaccagcgacttttagtgctgcaacgcaacccacaccgaaaaaaatcaacaacccggtaccgaggaattcagcaatgcactggcctttcaaggttgatgtttgactcataatcggatcctgaagagttaatgtttgttgtatgcgtgaaagtcacggacctccacgatgcttgtaggcatgctgtaaacttatcgttaacgagcaaaaacgagaaatatcgaacttaaaatgtgtgtgcttcgtcataaaatgagcgttatcgcgccatttattccatctgattgtacatgatgcatgtttgttagatcattcgcgcaacaaatttattaacattttcgattggtgtggattatgtcaccaggagaaggatgaaaagtgtggcaaaccgtaatctgcaaggcgtgccgctggacagcgatggcgcggcttcatacaatcggagctaactaaagtgcgctcgtatttattaaggcgtcaccggtaatcgggacgaggatttttatccatcaacgccttgcaattcaggagaggtatgacaatgtcattagaagtgtttgagaaactggaagcaaaagtacagcaggcgattgataccatcactctgttgcagatggaaatcgaagagctgaaagaaaaaaacaactcactgtcgcaggaagttcaaaatgcccagcatcagcgcgaagagctggagcgtgagaacaaccatctgaaagaacagcagaacggctggcaggaacgtctgcaggccctgctgggtcgcatggaagaggtctgattacacttcatctttcgcgtaatttctttactgtgtaggccaacaggtaacgcagaaaaaaggcaccttgcggtgccttttttatcattcaatatccagcggatcttctgaaagaataatcccggtattgtcggcataaagatggtcgccggagaagaaggtgacaccgccaaaattgacgcggacatcgctttcgccaatgccttcgccagcggcaccaaccggaattgccgccatcgcctggatgccgatatccaactcttccaggtcatctacctgacgcaccgcgccgtaaatgaccagaccttcccattcattttgtactgccagacgcgccagttcagcatcgaccagtgcgcgacgaacagaacctccgccatcgacgacaagaacacgaccacggccattctgttcgagcagatcgtacagcaacccgttgtcctcgaaacattttaccgtgattatttgtccgccaaacgacgcccgtccgccaaagttggagaacagcggttccacgacgttaacatcttcttgatagatgtcacaaagctcggaagtatcgtatttcataggcttaacattcagttgctgcgagaattttcagtatatcgcgctatgtgggctgttggcaaaatcatcaattgttaattgatatttgtcagttatgctgcccactggcttaggaatatccctaaaacaaacagcaggttagtcagtaacgctcctttgacagtgcgttccagcattggtcgcatcgccaccgggtccatttcgcgcatcacataacgagcttgcttcaccagcaacggtgccgccagcaggaacagccagccccacaggctatgcagcgaaaagagattaaacagcgccagacacaccagagagcccatcagcaggcaggcatgataacgacgcgcgtttactgcgcctaagcgcaccaccagcgtgtttttgccgttttcgcggtcgctattgatatcacgcaggttattaatgttcagtactgccgttgccagcaggccgcatgcggttgccggaaggatcagtgccggaatcaatgtatgagcctgtaaataccagctccccatgacgctcaaccagccaaagaaaaccagtacggaaatatcacccaaaccgatataaccataaggacgattgcccacggtgtaggtgatagcggcaatgatcgacaacccgccaagaatcaggaaaccgacaaaatcggccagcgtatggcacgccactgcaaccagtgccagcccggaaagacagatgagcacaacggtaataatgagcgcccgtttcatctcttgctgggtaatgacccctttttgcatgccgcgtagcggcccaatgcggtcaggtttatcgctgccttttaccgcatcgccgtaatcattggcgaggttagaaaggatctgtaatagcccggcggtaatcaatgccagcagggcgaccagtggatcgaagtgaccttgccaccatgccagcgccgtcccgacgataattgcagcaaaggcgagggggagggttttaggtcgtaaactttccagccacgcctgagttcggctaatttgttgttcagtcataatacgcgccaataaaaatggggcctttcagccccatcaaacaatgatgaaaatgattgaacgcgattataggataaaacggctcagatcttcatctgccaccaacgcatccagatgtttgctcacataatctgcgtcaatagtgatagtttgaccgcttaaatcgctggcgtcgtaggaaatctcttccattaaacgctccagaacggtatgtaaacgacgagcaccgatgttttcggtagattcgttcacctgccatgccgcttccgcgatgcgcttaataccggagtcggtaaactcgatatttacgccttcagttgccatcagtgctttgtactgcacagtgatagaggcattcggctcggtcagaatacgctcgaagtcgctggtggtcagtgcctgcagctcaacgcggattggcagacgaccttgcagttccgggatcaggtcagacggtttcgcaatctggaacgcgccagaagcgataaacagaatgtggtcagttttgaccatcccatgtttggtggaaacagtgcaaccttctaccagcggcagcaggtcacgctgaacgccttcacgagaaacatctggaccggaagactcgccgcgcttacagattttgtcgatttcgtcgataaacacgatcccgtgctgctcaacagcgtcgatagcatcttgcttcagctcttccgggttcaccagtttcgccgcttcttcttcaatcagcagcttcatggcgtctttgattttcagcttacgcgctttttgtttctgaccgcccaggttctggaacatggactgcagctggctggtcatctcttccatgcccggaggagccataatttcaacgcccatcggtgctgcggcaagatcgatctcgatttctttgtcatcaagctggccttcacgcagttttttgcggaatgcctgacgagcagcggacggttcctgctgctgttcggtctgtccccagttatttttagccggtgggatcagtacgtcgagaatacgttcttctgccagttcttcagcgcgataacggtttttctcgatagcctggacgcgtaccattttcacggcggcatcggtcagatcgcgaataatagaatccacttccttaccgacatagcccacttcggtgaatttggtcgcttcaactttgatgaacggcgcattcgccagcttagccaggcgacgggcgatttcagttttaccgacaccggtcgggccgatcatcaggatatttttcggggtcacttcatggcgcagctcttcgttgagctgcatgcgacgccagcggttacgcagagcaatcgccacagaacgcttggcgttgtcctggccgatgatgtgcttatccagttcgctgacgatttcgcgtggggtcatttcagacatgggagatccttacgctttgtagcttaattcttcgatggtgtggaaatggttggtatagatgcaaatgtcgcctgcaatatccaacgccttttcagcaatttcacgggcgctaagttcagtgttttctaacagcgcgcgcgccgcagcctgggcgtaagggccgccggagccgatagcaataagatcgttttctggctgcaccacgtcaccgttaccggtgatgataagcgatgcagtttcatccgcgactgccagcagtgcttcaagtttgcgcagcatgcgatcggtacgccagtctttcgccagctcaacggcggctttgaccagatggccctgatgcatttccagtttacgttcaaacagttcgaacagcgtaaaagcatccgcagtaccgcccgcaaagcccgcgatgactttgtcgttgtacagacggcggacctttttcacgttgcctttcattacggtattgcccaacgtggcctgaccatcaccagcgatgaccacatggccgttacggcgtacgcttactatagttgtcacgagctgaccccttggttacgaatacagagtacaaaccccgtacaaaagtacggggcataatgcaattatagatgggggggattttgagggtttcaacccccggcggcgagccgaatgcagtttgtatgacccgccatcttcaagcgattgagggtgctgtctgcgttctctttgcctttcaccgggccaatcaccacacgattccagccattgttggtggtaatttttgagtcaaagccttcgaacgccagctgagcacgtaccgtctctgcctgttccgcgcctctgaacgaaccgcactgcaccatccagcggcgttcgtcttttttctccgccgtcggttttggcgcgtcagcgacacgagcaaccggcgcagcttgctgcggcttcgactgcgcggtcgtgtgcgcaggggtttgcagcagatcctggtacggctgctgagtagaagccggtttagactggcgcggttgcgcctgtaccggcgcggcttgcgacgtacgcgtctgctgctgccagctttgttcagtcgtacgcgactgctgaaccaggcgttgctgctccgctaattgctgcgcctgacgctggcgctgtagcgtttgctgacgctgttccggcgtctgttcattccacggaacttcaaccagctgcgttggctgctggcgcatatcagcctgcatttgctcaagaagctggcgttgttctggtgtcagttgctccggcgttttcacttcaccaccggcagaaggttctgtaggcgcacgcacacccggctggcgactttccagctctttgatgtagcgccagcgttcttctggttttggtggtagtccgtttccggtcactttctggctttgcagcgtctcggactcttctttcttgtgatgcgtaatgaagtacagaccaccgataaaggtcacaagaacggcggcagcaatagcgaccatagcgggagaaaccgcaggcagatttcgttgctttttccgtgaggtgctcttttttcgccgcgaaggtgccggttggctgcggcgtacataatctcgttgtgccactatcgtttcgctgtatttattcgttcgtcagcccgccatgttacttaagcggcgggcctttgaccagtcacggcagtcttaaaggtttactttaaggtaacgcgcgtgttgatccccggatgataagttcgcagtccattaaacgagagccactgccaacgtgttgcccctgcatttgatcaagcaataacagcatagcttcccgaccgatttcgtaacgcggctgcgcgatggttgtcagcggcggatcacaaaattgcgtcaggtcgatgttatcaaaaccgattatggaaaggtcttccgggactttcagcccctggcgttttgcctgagaaagtgcgccgagcgccatcacatcgctatggcagaagacagcagtaggcggttgtggaagatcaagcaactgctgcatcgctttgcttccggcttcgaaggtgaagtcgccacgggcgatgtattgcggatcaaccataatgccgcagcgacgcagcgcctgaacgtagccttgcaggcggtagtgacacagcggcatctcttcgggaccggctatacagccaatccgtttatgcccttgctcatatagataatttactgcatcaaatgcggcggtcagattgtctatatgaactgtaggtagctccagttccggtgcaaattcgttcgccatcaccatcggcggcagattacgctgttcctcaatgctggcatcaaacggcagccttgaacccagcagcaacatgccatcaatttgcttggtgatgatcaaatcgataaaggttttttcctgctgattttgatgcgcacagtcgccaatcagcaccagatatccgtgatttgccgccgtaacttcgataccgcgaataatttcgctaaagaaagggtcgcagatatccgggacaatcaccagaatagtgcgggattcattacgcttgacgttgcgccccataggctgtggtaaataacccacttcccgggccgctttttcaacccgattacgagtggcctgggagactttatcgggattcattaatgctcgggagacggtcgctgtagagacttttgccttgagggcaacgtctttcatggtcgcggcagtttcctgcttcttcgctttcacactcactcctcgcctggcacgtcaggcgtactacatccatgtttacttcacatcggcaacatttttagcagatagcgcgtgaaaacggttacagaattttcatgaaaagtgtgatgaatattgaatttttcgatccgcctcgcatcgtgagcggtttaaccctcaatcggatcgacatccagcacccatttcaccttgcgggaatccggtattgtattaataagcgccagcgtaccattgatgatgtgctgtaagcgcacgcgggaagggtgctgcaacaatatctgccagcgccagcgaccgccacgtttaggggccagcgccggaaccggaccgagaacccacagtttctcgtctgccagtgggctggcgagaatgagattacgcagttgttgcaggaacaatggcgcgtgctgattgttatgatcttccgcacgcacaatcacatggctggtccacggcggcagctgcatcatgcgtcgttcagccagtgcctgttcggcaaaggcgtcgtagcctttatagagcaatgtttgcaacagaggatgttccggatggtgcgtttgcagcaccacttcgccctgtttacccgcacgcccggcacgaccggcgacctgggtgtaaagctgggcgaaacgttctgccgagcgaaaatcggcagaaaacagcgcgccgtccacatccagtaacgccaccagcgtcacatccggaaagtggtgacctttcgccagcatttgcgtgccaatcaagatcctcgcgccgccgcgatgcacttccgccagttgctgttccagcgcccctttgcggctggtggtatcgcggtcgatacgagaaatggggacaccagggaacaacggcgcgagcgtctgttcaagctgttcggtgcccagccccacgggtaccaggtgcgtggaaccgcaagaagggcactggcgcggcaccggacgctgactgtcgcaatggtggcagcgcaaatgctgttgcgcctgatgcagcgtgtagtagtgatcgcaacgtgggcattcggctatccagccgcagtcgtggcacagcagcgcaggcgcaaaaccccgacgattaagaaagaggataacctgattgttggcctgtaaatgctggcgcatacgggtgattaacgccggagccagacctgcctgcaccttctgaccttttaaatccagcacatgttgaattgccgggcgcgcattgcccgcccgacgggtcaggcgcagcaggcggtattttttctgctgcacgttgcataacgtttccagtgcgggcgttgcggagccaagaataattgggatttgctcgctatgcgcgcgatacaccgccaggtcgcgggcatgatagcgccagccttcctgctgcttgtaggagctgtcgtgctcttcatcaataacaatcacgccgagatttttaaacggcgtaaacagcgcggagcgggtgccgatgacaatcgccgcctcgccatttttcgctttcaaccacgccgaaagacgctcgctgtcgttcaggccggaatgcagaacttccaccggggcattaaaacgttcacgaaaacgggcgatagtttgcggtgtcaggccgatttccggcaccatcaccagcgcctgtttgccctgagcgagcacgttttccagtacactgagataaacctccgttttaccggaaccggtaacgcccgccagcagccaggcagaaaaagtatctgccgcgctatgaattgcgccaacggcggtggcctgttcggtattcaaccgcaaccgctcaccagaaacggcatagttcgttcgccagtcgctaaactctggtgtttcacttgctaaatcacacagaccttttttgcgcagtgcctgcaacgcggcatcattaaattcaagttccgcgacctgatcacgccagattttgccttgccgtaacgctgccagcgcctgttgttgctttggcgaacgtttcaggctgttcagatccaccgcctgaccttgttcagtggcaaaccagtaccacatcggcgcgttcgccgcaggccgcccctggcgcagtaaaatcggcaaggcatgaaacagcacatcgccaatcggatgatgatagtaatctgccgcccagagcagtaatcgccagacagagtgagtaaataccggctcaacgtccagcacttcaactaccgctttcagctcgttaagcggcagctcactgacatcgctcactgacaccacaacaccgatacgctcctgttgtttgccaaacggcacgcgcacgcgactcccggctttaaccgtcatgccttctggcagcagatagtcaaaggtacgaggaagcggaacgggcaaggcaacgtgggcaacgggcatagcatcatcctgacttgaaattcggtgggttagtatacacattgccgtagaagagtgcggatcagtttgcatacgctggttaatttctgtatgatttcgcgccttcgtacgaaatgatcgtattgaagctatacttttaacatcgcgtggtgtctggcgttagggctggaagagcgacgcggccttaaaccgaggttttcccatgaaaaaagatattcacccgaaatacgaagaaattactgctagctgctcttgcggtaacgtaatgaaaatccgctccaccgttggtcatgacctgaacctcgacgtgtgcagcaagtgccacccgttcttcactggcaaacagcgtgatgttgctaccggtggccgtgttgaccgcttcaacaagcgtttcaacatcccgggcagcaaataagaccggatttccgaaaaaagcgccgcacggcgctttttttgtgcctgaattttggtcgtattaccaggaaaacagcggccattctttggcgaccgtggtgagttgtggcgcatcgaaaacggcttgtggcgagaccaccgtttcctcaagcggaatatttttcccgtaacgttctttgagtttcgcctgaaccagcgggttactaagatcgaactctttcaacttctgctgttcacctacgcgcatccccagcgcgttctgataaaccttccacaccacttccgaacagtactggcgatcgtcgctccacgagaagctgaaatcgtacggtttgccgagataacgttttgccgtttgcgccagtttttgctgttgttcggtattcagtccaccttcaacgcggcgaacaatgtatttgccatcttcaccgtgggcgatccactgcttgagcggggtgtattttaccgggccggccgcttcaaaaacgtagggctttttgttgcgtatcaccagcataccggtgtggctgtaatcggaatgggtcgccagttggatcgctttactttgcgatgagcgagagatctgaaagatgatgtcgccggtttgtggttgccaggcaaatgcaggcacagaaaccagcaggctgagaatcagtagcctgattttcatcgttaaacgtccatgtatgaaaaaagcggctggttaactccgcgccgctcttttccgctttagtattcccacgtctccgggttaatccccatctcacgcatgatctcttttgccgcctccggaatttcgtcgctgcgctctttacgcaggtcggcatcatccggcaaaggttgcccggtaaaggcatgcagaaacgcttcgcacagcagctcgctgttggtcgcgtgacgcaggttgttcacctgacgacgcgtgcgttcatcggtgaggatttttaacaccttaagaggaatggaaaccgtaatttttttgacttgttcactcttcttgccgtgctcagcgtatgggctgatatattcgccgctccattcagccatgagatacttaatcctcttcgtcaataaattgaggccagaccacacaattaatatgggtactgaccgtaaacccgcatagtttaccgtacaggcgttaccgtgacatcgtgtaatgcacctgtcggcgtgataatgcatataattttaacggctatttgagatttgctcaatctatacgcaaagaagtttagatgtccagatgtattgacgtccattaacacaatgtttactctggtgcctgacatttcaccgaccaagcccagggaacttcatcacatgacgcgtaaacaggccaccatcgcagtgcgtagcgggttaaatgacgacgaacagtatggttgcgttgtccctcccatccatctttccagtacctataactttaccggatttaatgaaccgcgcgcgcatgattactcgcggcgcggcaacccaacgcgcgatgtggttcagcgagcgctggcagaactggaaggcggtgctggtgcagtacttactaataccggcatgtccgcgattcacctggtaacgaccgtctttttgaaacctggcgatcacagcacatcgccaatcggatgatgatagtaatctgccgcccagagcagtaatcgccagacagagtgagtaaataccggctcaacgtccagcacttcaactaccgctttcagctcgttaagcggcagctcactgacatcgctcactgacaccacaacaccgatacgctcctgttgtttgccaaacggcacgcgcacgcgactcccggctttaaccgtcatgccttctggcagcagatagtcaaaggtacgaggaagcggaacgggcaaggcaacgtgggcaacgggcatagcatcatcctgacttgaaattcggtgggttagtatacacattgccgtagaagagtgcggatcagtttgcatacgctggttaatttctgtatgatttcgcgccttcgtacgaaatgatcgtattgaagctatacttttaacatcgcgtggtgtctggcgttagggctggaagagcgacgcggccttaaaccgaggttttcccatgaaaaaagatattcacccgaaatacgaagaaattactgctagctgctcttgcggtaacgtaatgaaaatccgctccaccgttggtcatgacctgaacctcgacgtgtgcagcaagtgccacccgttcttcactggcaaacagcgtgatgttgctaccggtggccgtgttgaccgcttcaacaagcgtttcaacatcccgggcagcaaataagaccggatttccgaaaaaagcgccgcacggcgctttttttgtgcctgaattttggtcgtattaccaggaaaacagcggccattctttggcgaccgtggtgagttgtggcgcatcgaaaacggcttgtggcgagaccaccgtttcctcaagcggaatatttttcccgtaacgttctttgagtttcgcctgaaccagcgggttactaagatcgaactctttcaacttctgctgttcacctacgcgcatccccagcgcgttctgataaaccttccacaccacttccgaacagtactggcgatcgtcgctccacgagaagctgaaatcgtacggtttgccgagataacgttttgccgtttgcgccagtttttgctgttgttcggtattcagtccaccttcaacgcggcgaacaatgtatttgccatcttcaccgtgggcgatccactgcttgagcggggtgtattttaccgggccggccgcttcaaaaacgtagggctttttgttgcgtatcaccagcataccggtgtggctgtaatcggaatgggtcgccagttggatcgctttactttgcgatgagcgagagatctgaaagatgatgtcgccggtttgtggttgccaggcaaatgcaggcacagaaaccagcaggctgagaatcagtagcctgattttcatcgttaaacgtccatgtatgaaaaaagcggctggttaactccgcgccgctcttttccgctttagtattcccacgtctccgggttaatccccatctcacgcatgatctcttttgccgcctccggaatttcgtcgctgcgctctttacgcaggtcggcatcatccggcaaaggttgcccggtaaaggcatgcagaaacgcttcgcacagcagctcgctgttggtcgcgtgacgcaggttgttcacctgacgacgcgtgcgttcatcggtgaggatttttaacaccttaagaggaatggaaaccgtaatttttttgacttgttcactcttcttgccgtgctcagcgtatgggctgatatattcgccgctccattcagccatgagatacttaatcctcttcgtcaataaattgaggccagaccacacaattaatatgggtactgaccgtaaacccgcatagtttaccgtacaggcgttaccgtgacatcgtgtaatgcacctgtcggcgtgataatgcatataattttaacggctatttgagatttgctcaatctatacgcaaagaagtttagatgtccagatgtattgacgtccattaacacaatgtttactctggtgcctgacatttcaccgaccaagcccagggaacttcatcacatgacgcgtaaacaggccaccatcgcagtgcgtagcgggttaaatgacgacgaacagtatggttgcgttgtccctcccatccatctttccagtacctataactttaccggatttaatgaaccgcgcgcgcatgattactcgcggcgcggcaacccaacgcgcgatgtggttcagcgagcgctggcagaactggaaggcggtgctggtgcagtacttactaataccggcatgtccgcgattcacctggtaacgaccgtctttttgaaacctggcgatcacagcacatcgccaatcggatgatgatagtaatctgccgcccagagcagtaatcgccagacagagtgagtaaataccggctcaacgtccagcacttcaactaccgctttcagctcgttaagcggcagctcactgacatcgctcactgacaccacaacaccgatacgctcctgttgtttgccaaacggcacgcgcacgcgactcccggctttaaccgtcatgccttctggcagcagatagtcaaaggtacgaggaagcggaacgggcaaggcaacgtgggcaacgggcatagcatcatcctgacttgaaattcggtgggttagtatacacattgccgtagaagagtgcggatcagtttgcatacgctggttaatttctgtatgatttcgcgccttcgtacgaaatgatcgtattgaagctatacttttaacatcgcgtggtgtctggcgttagggctggaagagcgacgcggccttaaaccgaggttttcccatgaaaaaagatattcacccgaaatacgaagaaattactgctagctgctcttgcggtaacgtaatgaaaatccgctccaccgttggtcatgacctgaacctcgacgtgtgcagcaagtgccacccgttcttcactggcaaacagcgtgatgttgctaccggtggccgtgttgaccgcttcaacaagcgtttcaacatcccgggcagcaaataagaccggatttccgaaaaaagcgccgcacggcgctttttttgtgcctgaattttggtcgtattaccaggaaaacagcggccattctttggcgaccgtggtgagttgtggcgcatcgaaaacggcttgtggcgagaccaccgtttcctcaagcggaatatttttcccgtaacgttctttgagtttcgcctgaaccagcgggttactaagatcgaactctttcaacttctgctgttcacctacgcgcatccccagcgcgttctgataaaccttccacaccacttccgaacagtactggcgatcgtcgctccacgagaagctgaaatcgtacggtttgccgagataacgttttgccgtttgcgccagtttttgctgttgttcggtattcagtccaccttcaacgcggcgaacaatgtatttgccatcttcaccgtgggcgatccactgcttgagcggggtgtattttaccgggccggccgcttcaaaaacgtagggctttttgttgcgtatcaccagcataccggtgtggctgtaatcggaatgggtcgccagttggatcgctttactttgcgatgagcgagagatctgaaagatgatgtcgccggtttgtggttgccaggcaaatgcaggcacagaaaccagcaggctgagaatcagtagcctgattttcatcgttaaacgtccatgtatgaaaaaagcggctggttaactccgcgccgctcttttccgctttagtattcccacgtctccgggttaatccccatctcacgcatgatctcttttgccgcctccggaatttcgtcgctgcgctctttacgcaggtcggcatcatccggcaaaggttgcccggtaaaggcatgcagaaacgcttcgcacagcagctcgctgttggtcgcgtgacgcaggttgttcacctgacgacgcgtgcgttcatcggtgaggatttttaacaccttaagaggaatggaaaccgtaatttttttgacttgttcactcttcttgccgtgctcagcgtatgggctgatatattcgccgctccattcagccatgagatacttaatcctcttcgtcaataaattgaggccagaccacacaattaatatgggtactgaccgtaaacccgcatagtttaccgtacaggcgttaccgtgacatcgtgtaatgcacctgtcggcgtgataatgcatataattttaacggctatttgagatttgctcaatctatacgcaaagaagtttagatgtccagatgtattgacgtccattaacacaatgtttactctggtgcctgacatttcaccgaccaagcccagggaacttcatcacatgacgcgtaaacaggccaccatcgcagtgcgtagcgggttaaatgacgacgaacagtatggttgcgttgtccctcccatccatctttccagtacctataactttaccggatttaatgaaccgcgcgcgcatgattactcgcggcgcggcaacccaacgcgcgatgtggttcagcgagcgctggcagaactggaaggcggtgctggtgcagtacttactaataccggcatgtccgcgattcacctggtaacgaccgtctttttgaaacctggcgatctgctggttgcgccgcacgactgctacggcggtagctatcgcctgttcgacagcctggcgaaacgcggttgctatcgcgtgttgtttgttgatcaaagcgatgaacaggcattacgggcagcgctggcagaaaaccccaaactggtactggtagaaagcccaagtaatccattgttacgcgtcgtggatattgcgaaaatctgccatctggcaagggaagtcggggcggtgagcgtggtggataacaccttcttaagcccggcattacaaaatccactggcattaggtgccgatctggtgttgcattcatgcacgaaatatctgaacggtcactctgacgtggtggcaggcgtagtgattgctaaagacccggacgttgtcactgaacttgcctggtgggcaaacaatattggcgtgacgggcggcgcgtttgacagctatctgctgctacgcgggttgcgaacgctggtgccgcgtatggagctggcgcagcgcaacgcgcaggcgattgtgaaatatctgcaaacccagccgttggtgaaaaaactgtatcacccgtcgctgccggaaaatcaggggcatgaaattgccgcgcgccagcaaaaaggctttggcgcaatgttgagttttgaactggatggcgatgagcagacgctgcgtcgtttcctgggcgggctgtcgttgtttacgctggcggaatcattagggggagtggaaagtttaatctctcacgccgcaaccatgacacatgcaggcatggcgccagaagcgcgtgctgccgccgggatctccgagacgctgctgcgtatctccaccggtattgaagatggcgaagatttaattgccgacctggaaaatggcttccgggctgcaaacaaggggtaaaaatgagtgtgattgcgcaggcaggggcgaaaggtcgtcaactgcataaatttggtggcagtagtctggctgatgtgaagtgttatttgcgtgtcgcgggcattatggcggagtactctcagcctgacgatatgatggtggtttccgccgccggtagcaccactaaccagttgattaactggttgaaactaagccagaccgatcgtctctctgcgcatcaggttcaacaaacattacgtcgttatcagtgcgatctgattagcggcctgctacccgccgaagaagccgataacctcattagcgcttttgtcagcgatcttgagcacctggctgcgttgctcgacagcggtattaacgatgcggtgtatgcggaagtggtgggccacggtgaagtgtggtcggcgcgcctgatgtctgcggtgcttaatcaacaagggctgccagcggcctggcttgatgcccgcgagtttttacgcgctgaacgcgctgcgcaaccgcaggttgatgaagggctttcgtacccgttgctgcaacagctactggtacaacatccgggcaaacgtctggtggtgaccgggtttatcagccgtaacaacgccggtgaaacggtgctgcttgggcgtaacggttccgactattccgcgacacaaatcggtgcgctggcgggtgtttctcgcgtaaccatttggagtgacgtcgccggggtatatagcgccgacccgcgtaaagtgaaagatgcctgcctgctgccgttgctgcgtctggatgaagccagcgaactggcgcgtctggcggctcccgttcttcatgcccgtactttacagcccgtttctggcagcgaaatcgacctgcaactgcgctgtagctacacgccggatcaaggttccacgcgcattgaacgcgtgctggcctccggtactggtgcgcgtattgtcaccagccatgatgatgtctgcttgattgagtttcaggtgcccgccagccaggatttcaaactggcgcataaagagatcgaccagatcctgaaacgtgctcaggtgcgcccactggcggttggcgtgcataacgatcgccagttgctgcaattttgctacacctcagaagtggccgacagtgcgctgaaaatcctcgacgaagcgggattacctggcgaactgcgcctgcgtcaggggctggcgctggtggcgatggttggggcgggcgtcacccgtaacccgctgcattgccaccgcttctggcagcaactgaaaggccagccggtcgagtttacctggcagtctgatgatggcatcagcctggtggcagtactgcgcaccggcccgaccgaaagcctgattcaggggctgcatcagtccgtcttccgcgcggaaaaacgcatcggcctggtattgttcggtaagggcaatatcggttcccgctggctggaactgttcgcccgtgagcagagtacgctttcggcacgtaccggctttgaatttgtgctggcaggcgtggtggacagccgccgtagcctgttgagctatgacgggctggacgccagccgcgcgctagccttcttcaacgatgaagcggtcgagcaggatgaagagtcgctgttcctgtggatgcgcgcccatccgtatgatgatttagtggtgctggacgttaccgccagccagcagctcgctgaccagtatcttgatttcgccagccacggtttccacgtcatcagtgccaacaaactggcaggagcgagcgacagcaataaatatcgccagatccacgacgccttcgaaaaaaccgggcgtcactggctgtacaacgctaccgtcggcgcaggtttgccgatcaaccacaccgtgcgcgatctgatcgacagcggcgatactattttgtcgatcagcgggatcttctccggcacgctctcctggctgttcctgcaattcgacggtagcgtgccgtttaccgaactggtggatcaggcgtggcagcagggcttaaccgagcctgacccgcgtgatgacctttccggcaaagacgtgatgcgcaagctggtgattctggcgcgtgaagcgggttacaacattgaaccggaccaggtacgtgttgaatcactggtacctgcccattgcgaaggcggcagcatcgaccatttctttgaaaatggcgatgaacttaacgagcagatggtgcaacgactggaagcggcccgcgaaatggggctggtgctgcgctacgtggcgcgtttcgatgccaacggcaaagcgcgtgtgggcgtggaagcggtgcgtgaagaccatccgctggcatcactactgccatgcgataacgtctttgccatcgaaagccgctggtatcgcgacaacccgctggtgatccgcgggccaggtgcagggcgcgacgtcaccgccggggcgattcagtcggatattaaccgactggcgcagttgttgtagtgattattgaacaaaagctggcagttgccagcttttgttgtcacccctaaacctcttcctggggaagtggtgattgattgtcattttgcctttggtcagtgcccccggtaataagggggcttttgtgttgagcgatgaagtaacagagtgaatggtgaagttattaatgacaattacaaaatgacattaagtaacaatatctaaaatgtcacctaatttaaaattgataaccaatagtagtataggttccccatcctgtattttttaattcaaatggaccatctccgaagttaaccttctctcccgcattccattgtccaccgttgtgaaaataacgtagtgtaaatgcaaatttccagtgttcatatagaagggaaaggatatggcttgaagcaatagcattactggttcgtttattattgtgtgacttgtccgcaagatcggagccaaaatcaaagttagtaaaactattgtataccaatcgtcctccgaataaatttgtaagagggatgctatattttattttgaatcgatatccgtcccattcattttcattagcggcaccatagttttgccactgatacttggcgtatatattggcagaaagcttaattggtagacccgtgtcgatatctgtaccaagccccatataccatgtactttgccgggatgactggttgtcacccatatcatagacatagttgtttgcaatgaaccattctttaaatgggccgaacgcaagatttaatccggtcaatttgtcaatggaaaaccgaggttctatttccgtaaatagtggtgagccctcatcccagatcccaacatcatagtgactgccgacgccaaagaatttcggtagatcaacataaccataaaaatcaaaccagtcttttcttcctgctacagtatattcagggtagaggtcgttagtcagtcttgggccaaagcgagagtctgtgcgaccaatgacattcaagctttgatgtaaccagctttcatcaattttaatttcctgagcgtttccaatgcaaggtattaatagaatggataaagctatccagtgcttttttatatacataaatatatctcttatatattgttgatttagagagaaataatgtcatccagtgaatgaatggtattataagtttttgttatttgcttacttctacccgcatttcatttacctgtgcaggagtaatcttgtggcctttcttaaaataatcgattacgacattggacatgttatttccggcgcggacctggacatttttcccttctttgaatgccagaaaaccatcgcccccaagtgcaaggaaagtcgtagtcgcaacatggtaaatattcgtatcaacgatctcttcaccattaattttaaaagatacaatgcgctgacctactggtttctgcagggtatagcgcatttctgcgccttttgacatttgcaggatgccattggtaagcgatgccccgtgttccagtaggttacgcagatccttaccgctgagatccatttcagtaagttcattcttgaaggggaatgtactggtaatgtcaccaaaggtaatcgtgcctgcatttatatcagcacgtaaactgccggagtttatcaacgcaatttgtgcagtcggtgcagcgacaagcattgcatcggtaaacaggttgccaagttgcgatgactcaccgtaggcacgagttaatgcaatcgatgattcaccgactggttggcgtacaagatccgccagttttttattccagccattgataactttttgtgtggttggatcaggtatccattcatcggcataaaccgttttcagctcaaagctcttcactttatgagtacgagctgtagggttgacatcaaggattaatttaccaatatcgataccgccactgtcagtcgaaaggattaaggtgttgccgactttgattggttctggcgttccgacgtgggcatgcccggtaatcagaatatccaatcctttcaccttgcttgcggtttgaatatctttatccagcgcacgtctaacatctgtattgccaatgctggactgacgcgccggtacgccttcatgaaccagcgccacggtgaggtcaaccttatcacgtaactcatcgatataatgctgcaaatacttcacttcatcacgtgcttcaatcccctgattcttgagggtcgcggaagatttatcaaatcggttattattgtcattatcgagtccctggagagagagctccgagaccgtgtcattaaatgcaaatacgccgtgtagcccaacaataccaatcttgatgccatctttttccaggatggtgtagggcttgttccagaagggtttctcactctctttatgataaacattgcctaataaaacagggaaattcgctttgcttaattgtcggagggcattatcccagccatggtcaaactcatgattaccgattgatactgcgtcaaaaggcatggtattcataatatcaattattgcttcgccctttgtcaggctactgatatatggcccggtgaaatagtctccagcatcaaaataaaaggtggctttatttttggctttctcttgttttactaacgtggatatattggcaaagccaccaatgtcgcgttttccgtctgcgacatacggtactttataggaatccacatgagcgtgaagatcattggtataaataatcgtgacatcctgcgccataactgaggtcgaaaaaatagtcagcaatgttgcggcaaataaagtacgctgcgctgttttcattcgcattccttgttaaataaattgactgataaatgagattttatttggcgacgtccatgactcgtttagttaagtctggggtgacaggtttatgatttttgaaataatcgatgatagattccgccgaggttgttcccggtatcgtcttcacattttttccattcaaaaatgcttcaaaaccgtcaccaccactggcacaaaaggagtgcgtggcaatacgatatgtttgattatcttccacgggtttgccgttaatggtgaaagagattaaccgttggttgagtggttttttgctgtcatagacaaccgcaacacttttagaaacttgtaacacaccgttagttagattggttgcatgcgtcatcaatgatttgagatcgcggcccgtcaaatccatctcgatgaggtcattattaaaggggaatgtgctaataacatctcccagtgtgatatcgcctttaggaaaatcagctcgcatcccaccgctattttgaaatccggcaacggcatcaggtgttttttccatcattgcatcaagaataaggttgccggtagaagaggaactaccatactcacgtgttaaaactacgggagaatggccgacaacttcctttgttattttgttaagctttgcactccatttatcaatagtattttgaacgatggtgtcaggtttaaattgatctgcaaagatggtgattaactcaccattataactatcaattttcttcgttttcggattgtaatcaagcacaagttttccgatgttggtgccgtatgcatcggtagatacaattaatgtgttattaacttttattggttgcggtgttccgacatgtgcgtgaccggtaattaagacatcaacaccattcacttttttagctgtctcaatatctgcctgtagtagccgctccacatctttactaccaaagcttgattgacgcgccgggacaccttcgtgaattagcaaaacggtaatgtcgactttaccttttaattctgcaagtgctttatttaaatatttaatttcgtctctggcttctacgccttcacgtgcttttgccgcgactgtatcatagaaagcgaatgcgccatgcaatccaatcacaccaatctttaaaccatctttttcgataatggtccacggatgatcccaaactggtttattcgtatcggtgtagtagatatttcccagcagaatggggaattttgcttttgataactgagacaccatattgggcacaccgtgatcgaactcgtgattaccaacagacaccgcatcaaagggcatagtgttcatgatatcaataatagcttcacctttggtcagggtgctgatatacggcccggtaaaatagtcgcctgcatcaaagaaaaacacatctttgctttttttcttcgcttcattaacgatgcctgcaatattagccataccacctataagtctgttcttatcaacagcgatgatttttgccggattgacatgtgcgtgaatgtcattcgtataataaatagtaacgtcctgagctagaacactgtgagaaaatatcacgccgaatatgactgataatgttgtaaatacagttttcatcatccctcctggatagggtgtgttacatttgttgaattatttaaataaaaggcacatcgtgtcttattttatgtaagcatagttcagaaaagtattgtgtgatcttagtaacaaataatgttattaattaaacattgaccatgattatatttcacggtcatacatttatatatttaattaaatgaaaggtagtgatctctcttaatttatggtcgtttgtcgagtgtattgactaacaagatggagtgagcgattcattgtattttaacgccagtgaggtcagcatttgcgttacgcgacctgcggataataacgcgctttgggtaaagtcgtgttggtctgtcagccatgtgataaaacaacgactggttgccagagaaacatttgcgcccctttctaagctggctcccgtgagtaggcagaccatcttgcaattattcccctgctcccagcgctgccactgattttgccaccaaccatggtatgtcgttcccttaaaatgccagggcgtatcagcgttactgtcactgatttcttcttctacgaaccaaagttcaccttgttgttggcggaactgatctgcccaggctgtaataattgcgcctcttagaaaacattcgtgtgaaataatatgcgttttgacatctggatagcggattttcagtattctgaaatgcccgtgtgccgtgataaccgggcgtagtatggctcccttaccgttgcgcttgagtacagcactgccatactgaatttcatcgaactggctccggcgcaagaattgcgcttcacgcatatctaccttctgcacgatatcgcgatggtgcatagttggttctgtgttgcccttgtaactgtaccgcagactgtctcctgtctgatgttgcgtataattcgtggagagatgaagaatgttgccacgagtggcgtcaagactgactaaaacatacagtttttgtactgcgctggccccttgaaagggtatgaacagttgaacggtttcaatggcctggggatgcgtaatttctttctgatattttttaggcgtccagacttttttgcagttacggcattgaatgcgttgcgaaccctgtggattgtgaccataacaaatcatgtctgtgccataacataccgggcagaaatggcctttctcaattgcataagtagacaagtgaactgacaaccagtcacgaaattgttgctcgtcaaacaacggcgggtaactgccacatgcccgacagtgcagtgccggataacccagtttatagtctggccaactgtaatcttccgatgaggccaatcccaaatttcggcaaccgaacgttttacaggcattaatcgtaaacagagtcgacatatatcaccaacgatttcacaaggtcgttgattttgtccggcaactatcccctgcggatgtgattactctcacataaataagtctttcagaacgtaatgtagcaatcctttatctcactgaaagggattgtttatgaaaattaaaatacttgctgcgggtatcgcattaacactgccgttctgggcttgcgctaaagatgtcactatcatttataccaacgacctccatgcgcatgtagaaccttataaagtgccgtggatcgctgacggtaaacgggatattggcggctgggcaaatatcactacgctggttaagcaagaaaaagcaaaaaataaagcgacatggttttttgatgcgggcgactattttaccgggccatatatcagcagcctgaccaaaggtaaggctattatcgatattatgaatactatgccgtttgatgccgtcacaataggcaaccatgaatttgaccacggctgggacaacacattattacagttgagccaggcaaaattccctattgtgcagggcaatattttttatcagaacagcagtaaatcattctgggataagccatataccatcatcgaaaaagacggtgtgaaaataggcgttataggtttgcacggagtatttgcctttaatgatacggtatctgctgccacgcgcgtgggtattgaagcgcgcgatgaaattaaatggctacaacgttatatcgatgaactcaaaggcaaggttgatttgaccgtcgccctgatccacgaaggtgttccagcccgccagtccagtatgggaggcacagatgtgcgtcgcgcgttggataaagatattcagacggcaagtcaggtgaaagggctggatattttgatcaccggacatgcacatgtgggtacgccggaaccgattaaagtcggcaatacgctcatcctctccactgacagcggcgggattgatgtgggcaaactggttctcgactacaaagagaagccgcataattttacggtgaaaaacttcgagcttaaaaccatttacgctgacgagtggaagcccgatcagcaaacgaaacaggtgatcgacggctggaataaaaagcttgatgaagtggtgcaacaaacggtggcgcaatcgccggttgaattaaaacgtgcctatggtgaatcggcttccctcgggaacctggcggctgacgctttactggcagcagcgggtaaaaatacccaactggcgttaacaaactctggtggtatccgcaatgagatccccgcaggggcgattacgatgggcggcgtcatcagtacgttcccgttccccaacgaactggtgacgatggaactcacgggtaaacaattacgcagtctgatggaacacggcgcaagtttaagcaatggcgttttacaggtatcgaaaggcctggaaatgaagtacgacagcagcaagccggttggtcagcgggtaatcacactgactctgaatggcaaacccattgaagatgcgacggtttatcacattgctactcagagtttccttgctgatggtggagatggttttaccgcctttaccgaagggaaagcgcgtaacataacgggcggttattacgtttatcacgcggtggttgattacttcaaagcgggcaacaccattacggatgaacagctcaacggtatgcgcgtgaaggatatcaaataaaagtgcgcactgaattgactcaactgtttgttacccgttgattgcgcagatcctgtattcggcctacgcgagggcgcaggccaaatcagatgccttaacatcaccatccggtggcaggacgttgtttttcgaattagcccaggtgtcgctgtgttgtcagaatatgagtcaaaacgtgcgaggtggattgcgctatagagaaatcttttatcgcctctaattaagatgagtttttttcatcttccctgatttttcctcaccatcattggttatttttcggttgacgcccttcggcttttccttcatctttacatctggacgtctaaacggatagatgtgcacaacacaacatataacgataagcgattgatgaggtaaggtatgagcttttttcacgccagccagcgggatgccctgaatcagagtctggcagaagtccaggggcagattaacgtttcgttcgaatttttcccgccgcgtaccagtgaaatggagcagaccctgtggaactccatcgatcgccttagcagcctgaaaccgaagtttgtatcggtgacctatggcgcaaactccggcgagcgcgaccgtacgcacagcattattaaaggcattaaagatcgcaccggcctggaagcggcaccgcatcttacctgcattgatgcgacgcctgccgagctgcggatcattgcacgcgactactggaataacggtattcgccatatcgtggcgctgcgtggcgacctgccgccgggaagtggtaagccagaaatgtatgcttctgacctggtgacgctgttaaaagaagtggcagatttcgatatctccgtggcggcgtatccggaagtacatccagaagcgaaaagtgcccaggccgatttactcaacctgagacgaaaagtggatgccggagccaaccgcgccattactcagttcttcttcgatgtcgaaagctacctgcgttttcgcgatcgctgcgtctcggcaggcattgatgtggaaatcattccgggaattttgccggtttcgaactttaaacaggcgaagaaatttgccgacatgaccaacgtgcgtattccggcgtggatggcacaaatgttcgacggcctggatgacgatgctgaaacccgcaagctggtgggcgcgaatattgccatggatatggtgaagattttaagccgtgaaggagtgaaagatttccacttctatacgcttaaccgcgctgaaatgagttacgcgatttgccatacactgggagttcgacctggtttataaatagtgtgccttttgtgaaaatcacacagtgttcacaaattttaaacagagcacaaaatgctgcctcgaaatgagggcgggaaaataaggttatcagccttgttttcgccttcattacttgaagggtaccaggctaaaaccttttcttataaagcattctgccgaaatcagacatactcataaaggcttaattacgatcaatttgatctacatctctttaaccaacaatatgtaagatctcaactatcgcatccgtggattaattcaattataacttctctctaacgctgtgtatcgtaacggtaacactgtagaggggagcacattgatgagcacgtcagacgatatccataacacgacagccaccggcaaatgcccgttccatcagggcggtcacgaccagagcgcaggtgggggcacaaccacgcgcgactggtggccaaatcaactccgtgttgacctgttaaaccaacattctaatcgttctaacccgctgggtgaggactttgactaccgcaaagaattcagcaaattagattactacggcctgaaaaaagatctgaaagccctgctgacagaatctcaaccgtggtggccagccgactggggcagctacgccggtctgtttattcgtatggcctggcacggcgcgggtacttaccgttcaatcgacggtcgcggcggcgcgggtcgtggtcagcaacgttttgcaccgctgaactcctggccggataacgtaagcctcgataaagcgcgtcgcctgttgtggccaatcaaacagaaatatggtcagaaaatctcctgggccgacctgtttatcctcgcgggtaacgtggcgctggaaaactccggcttccgtaccttcggttttggtgccggtcgtgaagacgtctgggaaccggatctggatgttaactggggtgatgaaaaagcctggctgactcaccgtcatccggaagcgctggcgaaagcaccgctgggtgcaaccgagatgggcctgatttacgttaacccggaaggcccggatcacagcggcgaaccactttcggcagcagcagctatccgcgcgaccttcggcaacatgggcatgaatgacgaagaaaccgtggcgctgattgcgggtggtcatacgctgggtaaaacccacggtgccggtccgacatcaaacgtaggtcctgatccagaagcagcaccgattgaagaacaaggtttaggctgggcgagcacttacggcagcggcgttggcgcagatgccattacctctggtctggaagtggtctggacccagacgccgacccagtggagcaactatttcttcgagaacttgttcaagtatgagtgggtacagacccgcagcccggctggcgcaatccagtttgaagcggtagacgcaccggaaattatcccggatccgtttgatccgtcgaagaaacgtaaaccgacgatgctggtgaccgacctgacgctgcgttttgatcctgagttcgagaagatctctcgtcgtttcctcaacgatccgcaggcgttcaacgaagcctttgctcgtgcctggttcaaactgacgcacagggatatggggccgaaatctcgttacatcgggccggaagtaccgaaagaagatctgatctggcaagatccgctgccgcagccgatctacaacccgaccgagcaggacattatcgatctgaaattcgcgattgcggattctggtctgtctgttagtgagctggtatcggtggcctgggcgtctgcttctaccttccgtggtggcgacaaacgtggtggtgccaacggtgcgcgtctggcattaatgccgcagcgtgactgggatgtgaacgccgcagccgttcgtgctctgccagttctggagaaaattcagaaagagtctggcaaagcttcgctggcggatatcatcgtgctggcaggtgtggttggcgttgagaaagccgcaagcgccgcaggtttgagcattcatgtaccgtttgcgccgggccgcgttgatgcgcgtcaggatcagactgacattgagatgttcgaactgctggagccaattgctgacggtttccgtaactatcgcgctcgtctggacgtttccaccaccgagtcactgttgattgataaagcacagcaactgacgctgaccgcgccggaaatgactgcgctggtgggcgggatgcgcgtactgggtgccaacttcgatggcagcaaaaacggcgtcttcactgaccgcgttggcgtattgagcaatgacttcttcgtgaacttgctggatatgcgttacgagtggaaagcgaccgacgaatcgaaagaactgttcgaaggccgtgaccgcgaaactggcgaagtgaaatacacagccagccgtgcggatctggtctttggttctaactctgtcctgcgtgcggtggcggaagtctacgccagcagcgatgcccacgagaagtttgttaaagacttcgtggcagcgtgggtgaaagtgatgaacctcgaccgtttcgacctgctgtaatctgaccttcttcagcgactgcctttcatgcagtcgctgaagtttctttaccggcgtatagtgtccacaggaaaactacacactggatctctcatgtctgccgcaggaaagagcaacccactggcaatcagtggcctggttgtgctcacacttatctggagttatagctggattttcatgaagcaagtcaccagctacatcggtgccttcgacttcaccgccttacgctgcattttcggcgctctcgttttattcatcgtccttttattacgtggtcgcggaatgcgcccgacgccgtttaaatacaccttagccattgccctgttacaaacctgcgggatggttggcctggcacagtgggcgctggtcagcggcggagcggggaaggtggcaatcctgagctataccatgccgttctgggtggtaattttcgccgcgttgtttctcggtgaacgcctgcgacgtgggcaatatttcgcgatactgattgccgctttcggcttatttttggtgttgcagccgtggcaactcgatttctcttcgatgaaaagtgccatgctggcaatcctctccggtgtgagttggggggcgagcgcgattgttgctaaacgtctgtatgcccgccatccgcgcgtggatttattgtcgctaacatcctggcagatgctgtatgcggcgctggtgatgagcgtggtcgctttactggtgccgcaacgtgaaattgactggcaacccaccgtgttctgggcgctggcctacagtgcgattctggcgacagcgctggcgtggagcttatggttgtttgtattgaaaaacttgcctgccagtattgccagcttaagcacactggccgttcccgtttgcggcgtactcttttcctggtggctgctcggtgagaatccgggggcagttgaaggtagcggtattgtgctgattgtgctggcactggcgctggtgagccgtaagaaaaaagaagccgtcagtgtaaaaaggatctgaattttttcttcatgtggggagatctcttatttagcaaaataccgatagtgccccaccatccgccagctaaacagtacatcttcttcctgcgcgcctgcgccaatgttatgtatcaccagcggcgtaccgtcgcgggcgaagccatctgacaccaccccaatatgtgccagcccgttatctaatcgccaggagacaatatcgcccgcttgatagtcactggggttcttgctggtggggcgtgttttatcgtggcgggtaaaccaggtttccagattaggcacccgacggtgatcgatgttgctgtccgggcgctttaactgccatttttgcgggtacgcagcaaaattcttcgccatatcttcgtgcaccagtttctgcaaatcgaccttctggctgcgcaatgcacggatcaccacatcggaacatacgccgcgttcttgcgggacatcaccgccaggataggtaagctgcacatacgccggatcgtaaaatagcgtgctgccgatttgcagtctggcgccgtctgcgatggcaagattggtgttagcctggatttgtaccacggttggtggaacggcgggatattttaaggagtaactggtaaataacgtcagaagactgaataacgccagtgaagctttcatctgtttcgtccgtgaaaataagagtcacagattcgaccttccgggctaacgattgttctgtggagaaaatgtccagaagcggataaaaaaacacccgaacaaggtggaagtttcagattactggcacagcgtgccggatgcggcgtgaacgccttatccggcctacaaaagtacgtaaatttactatattgcagagattgcgtaggcctgataagcgtagcgcatcaggcaattttgcgttcaaactcccggacaagccgggagtttggagtaggttattcccactcttgcaggaaacgctgaccatactggtcggctaccagcagtgcggcgtaaacctgatctggcgtcgcgccgccaggcatgttgtggatggtttcaccttctgcacatgccgcttctgccacaattcgcattttcgccgggacatcttctttaatatccagttgagcgagagttattggcaaacctaccgcatggctaagcgcagctacggtttcgatttcctccaccggcgcgttttccagaaccagctgcgtcagcgtaccgaatgccactttttcaccatgataatagtgatgcgcgtccgggatagcggtcaggccgttatgtaccgcgtgtgccgccgccagcccgccgctttcaaaaccaacgccactcaaataggtgttcgcttcaatcacgcgctccagcgctggagtcactacatgctgttcggcggcaagcatcgctttttcgccttcttccagcagggtgttgtagcacagttcagccagtgccagcgctgcctgagtgcacttgccacccgccatggtggtcgcgccgctacgggaacaggcacgcgcttcaaaccaggttgccagcgcatcgccgatacccgccgctaacagacgtgcaggtgcaccagcgacgattttggtgtcgacaatgaccatattcgggttatttggcaacagcagatagcggtcaaactcaccctcatcggtgtagataacagacaatgcgctgcacggtgcgtcggtagaagcgatagtcggtgcgatcgctaccggaacacccatgaaatgtgccagtgctttggcagtatcgagggtttttccgccaccgataccgagaattgcgccacactgcgcagtctccgcgatgccacgcagacggtcgatctcattttgcgaacattcaccgccaaacggcgcaatttctactaccagtccagcatctttaaagcttttctcgacagtggattgagcaaaacctaaaacaaatttgtcacccaccactaaccagcgttccgccagtggcttcaggtactcgcccagacgattaattacatctgcgccctggatgtatttacctggtgattgaataatgcggtccataattactcctttagagatgagtagtgccaaatgcggcattccagtcgtgctcgaacttctctatagctgactctaccgcaggggtgttaagcatttgttgcgctacatctaagggcagtgtgatggattcacatccagccagcaaacaatccagcgcctgacgtggtgttttaaagctggcagccagcaccatgctttctggcgcatgcatttccagtaacgcttgcaactcctgtacagtacgaatgccgtcaccgccctgggcatctacgcggttaacgtatggagcaacgtatttggctccagccagcgccgccagtaatccttgcgcggcgctgtacactgcggttcccagcgtagtaatgccttctttcttcagcattttaattgctgccagaccttcagaggttaccggaattttcaccacaatgcccggaatagcgtcgcgcaggtgtttcgcttctttcaccataccctgcgcgtcgcggctcatggtctgagcaaacagaatgccctcatcaccaatcgctttttgcaggcgcggcagcacttcccagatggactccttgctggcagcgataatgctcgggttagttgtcaccccggcaatcgggaatatgcgtgccagacgttcgacttctgcgacgttagcggtgtccagatacagttccatgatgtttccttttacagttccagttcatgttgcagcaggctggcgatagcgtcggcagaggcggcgttaaccagcgcattacggaattcttcgtgcatgatgcgacgagcgaggcgcgagaaaatgcgcatatgttgatcgcccgcggcgtgtttgttcagggttaacataatgatgaattgcgcttcatcatcgccccagcgcattggcgcttgcagacgcgctacgctgatggtggattgctcaatgtgttccgatttactgtggggaatggcgaaactaaagcccagtccggtagagaaaacggcctcgcgcgcccacaagtcggcttccagtttacgcggatagcggcagcggcccgccagcagcaggttatcggtcatgcctttgagcacttcttctttgctgcgccagtcgctttccagtgtgatgcactcggcggtgaccagcggtgcgtcctgttgggtcatgcggaattgcgccagcaggtgttccacttccagcgaagtacggcaggccattgcttggttgagcaactggcggcactcacggctatcaagttgcgccatccgcgctttcgccgccggaattgatggtgcgctcatgctgagttcatccagccctaaaccgaccagcaacggcagcacggaacctttcgctcccagttcaccgcacagaccaatccatttgccctggcgatgcaccgcctgcacggcgtaatcgagcgcccgcaagaaggccggattcaggctgttgtagtgacgagtcaccttagcgttatcgcgatccactgccagtagatattgcgtcaggtcattactgccgatactgaagaaatcaatctcttcgcagcattgatcgatgatgaacatcaccgacggcacttccagcatgatgccgagctggatcttctcatcaaacggaatgtgttcgttacgcagttgctgtttggcttccgccagtttttctttcacccataagatctcttccattgaggagatcatcgggatcatgattttcaggctgccgtgagcagaggcgcgcaggatcgaccgtagttgtgtggtaaacaacgacgcgtattcttcataaatacgcaccgcgcgataaccgaggaacgggttagcttctgccggaatgttcagataatcaacgggtttatcaccgccaatgtccatagtgcgcacaataatgctgcgtccgttggcagactccagcgcctgacaaaaaatgttgtacagctcgctttcacccggtgcactggtgcgatccatatagagcatttcagtgcggaacaaaccaacgccttccgcaccattgccgaatgcggcctgcgcttccacggagtgagcgatgttagcggcaatttcaatgcggataccgtctgcggtacgcgcttgctgggtcagccagacacgctgttgctcacgcagagcgtcctgtacgcgggcttcttgctgataataacgggccacggattcccctggctcaaccacaatcgcccctgcgttgccgtcgatataaatcgtctgatgctgccacggagtaagggcagcaatatccacacctaccagcgtcggaatgttgaacgaacgggcaaggatcaccgtatgtgatgtggtgccgccacttttcagtaatagacctttgaggtgatttttatccagttcgaggaactggctgggggtcagttcatcagccatacaaatggcgggctgcgtcagtttgcccggtgccgggaagcgttgctcaccgtagatttgctggagtaactggaagcagacgtcgcgtacgtccagggcacgttcttgcaggtagctgctgctggaacgggcgaactcttcgcaaaagtgattcgcactggcaacaatcgcttcggcgcagcttaatccggcgctgacacctgccagtaaatgttcgcgcagggaagtatcgccagccagggatcggtgcgcttccagaatcgcgctggtagcaccgtcgctatccagcagacgaaactctatgtttttcagtaccagcgtcagaccgttttccagtgcggattgttcggcgtcaacgcctttggctgcgggaagattacccagcgcattgagatctaaagaagagatcggcgtcagaatgccgcctgcgctaccactgcacacggtgcgagcacggataatttgcggattcagattggtcagtgaaaccggcagtggttccagttcgtcagattttacttccgccagcggtgcgtcgcagtgggggaattcatcgcgcagccattggcttaaacgctggtacgcttcctgttcgtcggccccggaaatcagtaactggcagttatcgcccaccagcgtatcggtgccaatcagcgcaagggcgcttttggcgttgcccttgcggtcagtgcgcaggttatgccactcaatttgtgatgaaaaagtattacacagcgtttcaacgtggcttgccggacgcgcatgcacgccgttaggtagctcacaaataaattccacaatcagggccattgcctttctcccggtacggttttctgtttacaggataagagcgcacggcaacggcctgccatgtgacaaatctgccaaaagctggacaaatgtaatgtaaccgtcaatttgcgacgcgtctcacaagacgccgttttgcggcgtacttccggattatcgcaagttatgaggcggatcgcatttttgtactgatattacaaaagtccagtaaatggcctttttatccactgtttgctccgcctgcgattgcctattgtttcttccatcaaaaatatggacatgggctttcgcaagcccgggagcagcttatgaatgagttggtgcagatcctgaaaaatacccgtcagcatttaatgacgggcgtttcacacatgattcccttcgtggtatcgggcggtattttgctggcggtttccgtcatgttgtatggcaaaggcgcagtgccggatgccgtagccgatccgaatctgaaaaaactgtttgatatcggcgttgcaggtttgacgctgatggtgcctttcctcgccgcttacatcggttattccattgcagaacgttctgcgctggctccatgcgctatcggtgcctgggttggtaacagctttggcgcgggcttctttggtgcgctgatcgccgggattatcggcggcatcgtggtgcattacctgaagaaaattccggtgcataaagttctgcgctcggtgatgccaatcttcatcattccaatcgtcggcacactgattaccgctggcgtcatgatgtgggggctgggcgagccggtgggggcgttgaccaacagcctgacccagtggcttcaggggatgcagcagggcagcattgttatgctggcggtgatcatgggtctgatgctggcgttcgatatgggcggcccggttaacaaagtggcctatgccttcatgctgatttgcgttgctcagggtgtttataccgtggtggctattgccgctgttgggatttgtgttccaccgctggggatggggctggcgacgctgattggtcgtaaaaatttctccgcagaagagcgcgaaaccggcaaggcggcactggtgatgggctgtgttggcgttactgaaggggcgattcctttcgccgctgccgatccgctgcgtgtcattccttccatcatggtcggttcagtttgtggtgcggtaactgcggcgctggtcggtgcgcagtgctatgcaggctggggtggtctgattgtgctgccggtggttgaaggtaagttgggttacatcgcggcagtggctgtcggggcggttgtgacggcagtctgcgtgaacgtgctgaaaagtctggcgcgtaaaaatgggtcttcaactgaagagaaggaagacgacctggatctggattttgaaattaattaattgaggaacgagccatgacgaaaattatcgcagtaaccgcatgtccttcaggtgttgcccatacttatatggcggcagaggcgctggaaagcgccgcgaaagcgaaaggctgggaagtgaaagtagaaacccaggggtcgattggtctggaaaatgaactgactgcggaagacgtggcaagcgccgatatggtgattttgaccaaagatatcggcatcaaatttgaagagcgttttgctggcaagactatcgtgcgtgtcaacatcagcgacgcggtaaaacgtgctgacgccattatgagcaaaattgaagctcacctggcgcaaaccgcttaagttcttatcccgcccgcaagggcgggttcgctttcccacaggagttcctcatgacgaatcgtatctctcgcctcaaaactgcactgtttgccaatacccgtgaaatctcgctggagcgggcgttgctttataccgccagccatcggcaaaccgaaggggagccggtgataatgcgtcgggcgaaagcaacagcgtatatccttgaacacgttgaaatttcgattcgtgatgaagaactgattgccggtaaccgcaccgtaaaaccacgcgccgggattatgtcgccggaaatggacccttactggctgctgaaagagctggatcaattcccgacgcgtccgcaggaccgctttgctatcagcgaagaagataaacgtatctaccgcgaagagttgttcccgtactgggaaaaacgttcgatgaaagatttcatcaacgggcagatgacggatgaagtaaaagccgcgaccagcacgcagattttcagcatcaaccagacggataaaggccaggggcacattattattgattacccgcgcctgctgaatcacgggctgggggagctggtggcacagatgcagcaacattgtcagcaacagccggagaatcacttttatcaggcagcgctgttactgctggaagcctcgcagaaacatattttgcgttacgccgaactggcggaaacgatggcggcaagctgcactgatggcccgcgtcgcgaagaactgctgaccattgcggagatctcccgccataacgccgaacataagccgcagacgttctggcaggcgtgccagttattctggtacatgaacatcattctgcaatacgaatccaacgccagttcgctatcgttggggcgcttcgaccagtatatgttgccgttctatcaggcatcattaacccagggcgaagatccggcattcctgaaagaactgctcgaatctttatgggtgaaatgcaacgacatcgtgctgttgcgctccaccagtagcgcgcgttatttcgcaggtttccctaccggctataccgcactgctcggcgggttaaccgagaacggacgtagcgcggtgaacgtgctttcgttcctttgccttgacgcttatcaaagcgtgcaattaccgcaaccgaacctcggcgtgcgcactaacgccttgatcgacacgccgttcctgatgaaaaccgcagaaaccattcgcctcggcaccggtattccgcaaatctttaacgatgaagtggtggtgccagcgttcctcaaccgtggcgtttcgctggaagatgcgcgcgactattccgtagtgggctgtgtggaattatctattcccggcagaacctacggcttgcatgacatcgcgatgtttaacctgctgaaagtgatggaaatctgcctgcatgaaaatgaaggcaatgctgcgctgacttatgaaggtttactggagcagatccgcgccaagatcagccactacatcaccctgatggttgagggcagcaatatttgcgatatcggtcaccgtgactgggcacctgtaccgctactctcgtcttttatcagcgattgtctggaaaaaggtcgcgatattaccgatggcggcgcgcgttataacttctccggcgtacaggggatcggtatcgccaacctgagcgattctctccatgcgttgaaagggatgatttttgatcaacagcgtttaagttttgacgaattgctgtcggtattaaaagccaacttcgccacgccagaaggcgaaaaagtccgcgctcgcttaattaaccgcttcgagaaatacggtaacgatatcgacgaggtggataacatcagcgccgaactgttacgccactactgcaaagaagtggaaaaataccagaacccgcgcggcggctacttcacgccgggatcgtataccgtttctgcccacgtcccgttgggatcggtggttggcgcgacgccagacggtcgttttgccggagaacagctggcagacggcggcttgtcacccatgctgggccaggacgcacaagggccaacagcggtactgaagtcagtcagtaagctcgataatacgctgctgtctaacggtacgttgctgaacgtgaaattcactccggcgaccctggaaggtgaagcgggattacgcaaactggccgacttcttacgggcgtttacccagcttaagttgcagcatattcagtttaacgtggtgaacgccgacacgttacgggaagcgcaacagcgcccacaagattatgccgggctggtggtgcgcgttgccggatacagcgccttctttgtcgaactgtcgaaggagatccaggatgacatcatccgccggacagcgcatcagctgtaacgttgtggaaacgcgccgcaatgatgtggcgcgcattttcaacattcagcgttattcactgaatgacggcgagggcattcgtacggtggtcttttttaaaggctgtccgcatctttgcccatggtgtgctaatccggagtcgatctccggcaaaatccagacggtgcgcagagaggcgaaatgtctgcactgcgcgaaatgtttgcgtgatgcggatgaatgcccctccggggcatttgaacggattggtcgcgatatcagccttgacgctctggaacgggaagtgatgaaagatgacattttctttcgcacgtccggcggtggcgtcacgctttctggcggcgaagtgttaatgcaggcggagtttgcgacccgttttttacagcgactgcggctatggggtgtgtcatgcgccatcgaaactgccggagacgcgccagccagcaagctgttaccgctggcgaaattgtgcgatgaagtgttgttcgatttaaaaattatggatgcggctcaggcgcgggatgtggtgaagatgaacctgcaacgcgtgctggagaatctgcgtttgctggtgagtgagggtgtcaacgtgatcccgcgtttaccgctgatccctggtttcacgctcagccgggagaatatgcagcaggcgctggacgtgctgatcccgctgaatatcaagcagatccatctgttaccgtttcatcagtacggcgagccgaaataccgcctgctggggaaaacatggtcgatgaaagaggtttctgcgccgtcgtcagccgatgtggcaacgatgcgtgaaatggcagaacgggccggatttcaggttaccgtgggaggttaaaatggcatatctggtggcagtaaccgcctgcgtaagcggcgtggcgcatacttatatggcggcggaacggctggaaaagttgtgccagttagagaagtggggcgttagcattgaaactcagggcgcgttgggaacggagaatcgtttagcggacgaggatatccgccgggcggatgttgcgctgttaattacggatatcgagcttgccggtgctgagcgatttgaacattgtcgctacgtgcaatgcagcatctacgctttcctgcgtgagccgcagagggtgatgagcgcagtgcgcaaagtgctttctgcgccgcagcaaacccatcttattctggagtagtcggtttttctgtcagttggctgtggtactgccgacgatattccgacggcgagcgttcggtatttttacgaaacagacggcagaagtagttgctgtcgacaaagccgcaggcgtgcgccacttcttttaccttcaggtcatagcctttcaataatgtcttagcgtgctccagtcgcgtgtgattcaggtattcgttaaaaccaatggcccccgttttttgaaacaggtgcgagaggtaatttggcgaaatatagaacgcctgtgcgacagattcgcgggtaagtgcggaggcatagcgttcgtcgatataatcacgaatagcttcgaatagagcctggctgcgtgaggcggtctgtatttggctgccgagcaaatcgcggcagtggctaagcaggctggcgacgataagtctggccgtttgctgctcctgcgactgcatttgcatttcattgagcgtttgtagcagaaaagaaccaatgcgcgggccgcgtcgggcgacgtgttgcttcgccagattttgatattgtttgccatcccattgcacaacgctgaagccgagttgctgtttgccaaacagcacgctaaaggtggtggcgggggcttgccattgtggaaaattccagccaccagcagggacgtacagcacatcgccgggaactaacgctgctccagcgccggtatcaataaactcaccttccagcacaatttccagccgtggaaaatcgacctgatacgcaagatcgggcaccgggccgttgctgctggcaaagtaaatctggcgcagggacagcgggccgttgatcaggcgggagagcagatagctgacgtcgtgatacatgttattcccttaggtatgtagacgggaaaacagtaactggcattatgaaaaaaggccacctgaaaagtgtggcctgatgggagttcgatgtaaacattgcgacagtttcagtcgccttgtattgccggatgcggcgtaaatgccttacccggcctaccgccgcgatctgtaggccggataagacgcgtcaagcgtcgcatccggcaaataacatctggctgataattactgattacccacctgatcgccatacggcagagtgtcgtaatcgatcagtgcgtttttcttatacgggttaccaatccagcgggtagtttctttgaactgcggattcaccactgaacgggttggatcgtaaccgtcgtaagataagcccgccaaatctgaccaggtgtggatcagttccgccaggctgtatttacgatcaacatcttgtgagaaatcacgcggatgagtcgcttgccatttttctgacgtccacagcaggaacggaatggtgtacatatgacgcgtcgggttgtcttcattacgcccctgagttttgtgcggcggcgtgtcgtaaacctcttcaccgtggtcagagaaataaaccaggaaaccgttcggatcggtcgctttaaagtctttaatcaggctggcaaccacgtgatcgttgtacaggttagcattgtcataatcattatatgactccagctcttctgcgtttaatcccggtggaacatgctctgtattaccgtcaaatttgccctgatcttccggataacggtacttgtacttgatatgcgtacccagcagatgaaggatgatcagtttcttcggcgcagggtccttcagcacttcctggaacggcttcagcacgttggtgtcatattcacgcgcactctgcgtacgttgctggttcatgtagtactgcttgtcggtctggcgcgaaaataccgtcagcatggtattgcgggcggtcatcgtctgctggttggtgatccagaaggttttataacccgcctgtttcatcatgttcatcagcgacggctgcgtcagatacagatccgggttcttttcattggcaaaggtcagcgcctgttgcaggatttcaatggtgtacggacgagacgtaaccacgttattaaacacggtcagattcggatcggttttatgcagcgcatccagctccggcgtggtttcacgcggataaccgtacagactcatgcgtccacgctgggtcgattcgccaattaccagcactaaggtgcgcggttcgttacccgattcatctttgaaattagccagcggcggcaaggcattattttcattcagtagctttgttagcgagtttagttgctgacgatactgataatagccggtcaggaattgccacggtgcggcaggctccatacgcgatgccaggttatccaacgttttctcaaacggcttgttcttgataaacgtattcatggcgatcggatgcagaatcaagccataaagcagggcaaaagagacaacataacgccacggctttggaatatagaccgggcgcaggcgtgtccacagcagaactgccaccgccgtataggccagcgcgataagcacaattttcaggctgaaatactggcttaaatactcgctggcttcgttggtgttggtttcgaacatcacaaacagaacgctctgcgagaactcctgaccgtagatgacgtaatagcacagcgccgccagagaggccgcccatagcaccacgccgatcactgcggcaataattttaatccgcttcggaaagaggaataccgggatcaaccacagcgaactgaataacagcgagtcgcgaatgccgttagtgccactataaccactgatgtaaataatggcctgtagcagagtagagaaaaaccaaaagtagagcagtgcccaacccagggctttccagctaaaaaggggtttagcctggacttctgtggaatgcatagtaagaacctgtcttgaaaaaaatatcgccgaatgtaacgacaattccttaaggatatctgaagggatatccagattttgaataaaatgcagacagaaatatattgaaaacgagggtgttagaacagaagtatttcagaaaaccctcgcgcaaaagcacgagggtttgcaggagaggaagattagccggtattacgcatacctgccgcaatcccggcaatagtgaccattaacgcctgctcgacgcgaggatccggttcctggccttctttttctgcctggcgggagcggtgcagcaactcggcctgcaatacgttcagcgggtcggtgtaaatattccgtagctgaatagactctgcaatccacggcagatcggccatcaggtgagaatcgttggcaatcgccagcaccactttgatgtcttcttcttgcagattgcgtaactctttacctaacggccacagtgctttgtctaccaggcgttggtcatagtattccgccagccacaggtctgctttggcgaagaccatctccagcatgccgagacgcgtcgagaagaatggccaatcgcggcacatggcttccagctcgctctgtttgccatcttcgaccactttttgcagcgccgtacctgcacccagccaggcggggagcatcaggcggttttgcgtccaggcgaaaatccacggaatagcgcgcagtgactcgacgccgccggttgggcgacgtttcgccggacgtgaacccaacggcagtttacccaattcttgttccggcgtagcggagcggaagtaaggcacaaaatctttgttttcacgtacgtagccacggtagagatcgcaggagatgactgacagttcatccataatgcgacgccagctctctttcggctcaggcggtggcagcaggttggcttccagaatcgccccggtgtacagcgacaggctgctgacggtgatttctggcagaccatatttaaagcggatcatctcgccctgttcggtcacgcgcaggccacctttcaggcttcctggcggttgtgacagcagcgccgcatgggcaggtgcgccgccgcgaccaatggaaccgccgcgaccgtggaacaacgtcagctcaatacccgctttttcgcaggttttgattaatgcatcctgtgcctgatattgcgcccaggaagctgccatcacgcccgcatcttttgctgagtcggaatagccaatcatcaccatctgtttgccctgaatcaggccgcgataccagtcgatattcagcagctgggtcatgacatcgttggcgttgttcaggtcatcgagggtttcaaacagcggagcaaccggcatcgcaaacccgatacccgcttctttcagcagcaggtggacagccagcacgtcggacggcgttttcgccatcgagatcacgtaggcggcaatggagccttgcggcgcttcggcaatcacctggcaggtatcgagcacttcgcgcgtttcggcgcttggttgccagttgcgtggtagaagcggacgtttggagttcagttcgcggatcaggaacgcctgtttgtcggcttctgaccagctttcataatcgccgataccgaggtagcgggtcagttcgcctaatgcttcggtatgacgcgtgctctcctgacggatatcaatacgcaccagcggtacgccgaaacatttcacgcggcgcagggtgtcgagcagatcgccattggcgataatacccatgccacacgcctgaagtgactggtagcaagcgtagagcggttcccacagttcttcgttttgtgtcagcagaccttctggttttggcaattcttcgcctttcaggcgcgcttccagccatgcctgtgtcgccatcaggcgagaacgcaggtttttcatcagatagcgatacggttctgcggcaccctcttcgccaaccagcgccagcagttcaggggtggcttcaaccatcgacagttcagaaaccagaacctgaatatctttcaggaacaaatcggtggctttccagcggctgagtagcaggacgtggcgggtgatatcggcagtgacgttcgggttgccgtcgcggtcaccgcccatccacgaggtaaaacggaccggaacaaattcgacgggcagtttgtagccgaggttctcttccagttgttcgttcagttcgcgcaggtaattcggtacgccttgccacaggctgttttctactacggcaaagccccatttggcttcatctaccgggcttgggcgcagtttacggatttcatcggtatgccatgactgggcgatcaactggcgcaggcggcgcatcagctggttgtgttcgtagtcggcgatatctttgttatcgagctgttttaaacaggcgttcacttccaccattttgtggatcagtgtacgacgggtaatttcggttgggtgagccgtgaggaccagttccagcgacagcgattccactgcttttttgatggtgtcttcgctcagttccggctggtttttcagtttacgcagggtgcgggcgatcacttccgggttgctggcagcttcgcctttcggcgaaatgctgtggtattgctcagcggtgttggccaggttcaggaactgactaaacgcacgcgcaacgggcagcagctcgtcgttcgacaaattttgtaaggtggtgagcaactcctggcggttagcatcattgccagcgcgtgaagatttggacaacttacggatagtttctacgcgttcaagaatgtgttctcccaacgcatccttgatggtttctcccagcactttgccgagcatactgacattactacgcaatgcggaatattgttcgttcatattaccccagacaccccatcttatcgtttgatagccctgtatccttcacgtcgcattggcgcgaatatgctcgggctttgcttttcgtcgtcttttataaagccacgtaaaagcggtgacgtcaaatgctgcgaaatcgcttcagcaaacgaataaatagcaggaatttacgccattaaattcacgacgctttaaataagcgtaacttatgggaatgttaaaaaatcgcctcgaataacaccaaaggtgtaggtcggataagatgcgcaagcatcgcatccgacattgtttggcctacgttttaatgccagcaaaaatggtgaatcacctgggtgatcagttcgcgggtgggcttgataaacctcgtctccagatattcatcaggctgatgagcctgattaattgagccaggccccagaaccagcgtcgggcataacgtttgaataaacggcgcttcggtacagtaattcaccacttcggtctttgctccgagcaatttctcaaccacttcaaccagttgatgattcggtgggcattcatagccagggatcggcggatgcagctcgtcgaccgtcagacgacccggccagcgttcgctcactggagccaatgcatcgttgagcaaaccgttaagttcattgagtgtcatgcctggcagcggacgaatatccatatgcaactcacaacaagcgcaaatacggttagatgcatcgccgccgtggatatgcccgaggttgagcgtagggtatggcacggtaaacgcgtcgtagtgataacgttctttcaggttatcgcgcaattgcaaaatatgccctatggcgtcgtgcatcagttcgatagcgttaactccgcgtgctggatcgctggagtggcccgactggccctgaatacggatggcgttagagatatgacctttatgcgcgcgtaccggttgcagcgacgttggctcgccaatgatggcgcaatccgggcgcagggcggtagtttcggcaaaataacgcgctccggccatactggtttcttcatcggcagtcgccagaatgtagagcggttttgcaagcttcgtgacgtcgacatcgcgtagcgcatcaaggataaacgcaaaaaagcctttcatgtcggcggtgcctaagccgtaaagcttgccgtcatgctccgtcaacgtaaatggatcgcgcgtccagcgtccgtcatcaaatggcaccgtatcggtatgccccgccagcaacaaaccgccagccccctgtccgcaactggccagcatattaaatttgttgcgagttcctggcacaggctgtacttccacattgaagcctaaatccttaaaccagtccgccagcagagtgattaaatctgcattgctttgatcgagtgcctcttccgtggcgcttattgaaggtgtggcaatcagagcacggtaaatctcgataaatggcggtaatttgtttttcattgttgacacacctctggtcatgatagtatcaatattcatgcagtatttatgaataaaaatacactaacgttgagcgtaataaaacccaccagccgtaaggtgaatgttttacgtttaacctggcaaccagacataagaaggtgaatagccccgatgttgaatacgctgattgtgggtgccagcggctacgctggcgcagagctagtgacctatgtaaatcgccatccgcatatgaacataaccgctttgactgtttcagcgcaaagcaatgatgcgggaaagttaatctccgatttgcatccgcagctaaaaggcatcgttgatctgccgttgcagccgatgtcggatatcagcgagtttagcccaggggtggacgtggtgtttctcgccaccgcccatgaagtcagccacgatttagcgccgcaatttcttgaagcaggctgtgtggtgttcgacctttccggcgcgtttcgtgttaacgatgtcgccttctatgaaaaatattacggctttacccatcaatacccggaactgctggaacaggcagcctacggtctggcggagtggtgcggtaataaattaaaagaagcgaacttgattgccgtgccaggctgttatccgacggcagcacagctggcgctgaaaccgttgattgatgccgatcttcttgacctcaatcagtggccggtgatcaacgccaccagcggcgtgagcggtgcaggacgtaaggcagcgatttcaaatagtttttgtgaagttagcctgcaaccgtatggcgtctttacccatcgccatcaaccagagatcgccacacacctcggtgctgacgttatcttcaccccgcatctgggcaatttcccgcgcggcattctcgaaaccattacctgccgcctgaaaccgggtgtgagccaggtgcaagtggcgcaagcgttacagcaggcgtatgcccataaaccactggtgcggctgtatgacaaaggcgttccggcgctgaaaaatgtcgttggactgccattctgcgatatcggttttgccgttcagggcgagcatctgattattgtggcgaccgaagacaacttactgaaaggcgcggcggcacaagcggtgcagtgcgccaatattcgtttcggctatgcggaaacgcagtctcttatttaagggtgcaatgatgaatccattaattatcaaactgggtggcgtactgctggatagtgaagaggcgctggaacgtctgtttagcgcactggtgaattatcgcgagtcacatcagcgtcagctggtgattgtgcacggcggcggttgcgtggtggatgagctgatgaaagggctgaatctgccggtgaaaaagaaaaatggcctgcgggtgacgcctgcggatcagatagacattatcaccggagcactggcgggaacggcaaataaaaccctgctggcatgggcgaagaagcatcagattgcggccgtaggtttgtttctcggtgacggcgacagcgtcaaagtgacccagcttgatgaagagttaggccatgttggactggcgcagccaggttcgcctaagcttatcaacagcttgctggagaacggttatctgccggtggtcagctccattggcgtaacaaacgaagggcaactgatgaacgtcaatgccgaccaggcggcgacggcgctggcggcaacgctgggcgcggatctgattttgctctctgacgtcagcggcattctcgacggcaaagggcaacgtattgccgaaatgaccgccgcgaaagcagaacaactgattgagcagggcattattactgacggcatgattgtgaaagtgaacgcggcgctggatgctgcgcgcacgttgggccgtccggtagatatcgcctcctggcgtcatgcggaacagcttccggcactgtttaacggtatgccgatgggtacgcggattttagcttaagttttgttggccggaggcgcagctttccggcattgaatttcaaaataaggaaacagagttatggcactttggggcgggcgttttacccaggcagcagatcaacggttcaaacaattcaacgactcactgcgctttgattaccgtctggcggagcaggatattgttggctctgtggcctggtccaaagccctggtaacggtcggcgtgttaaccgcagaagagcaggcgcaactggaagaggcgctgaacgtgctgctggaagatgttcgcgccaggccacaacaaatccttgaaagcgacgccgaagatatccatagctgggtggaaggtaaactgatcgacaaagtgggtcagttaggcaaaaaactgcataccgggcgtagccgtaatgatcaggtagcaactgacctgaaactgtggtgcaaagataccgttagcgagttgctgacggctaaccggcagttacaatccgctctggtcgagaccgcgcagaacaatcaggacgcggtgatgccgggttacactcacctgcaacgcgcccagccggtgacgttcgctcactggtgcctggcctacgttgagatgctggcgcgtgatgaaagccgtttgcaggacgcgcttaagcgtctggatgtcagcccgctaggttgtggcgcactggcaggaacggcctatgaaatcgaccgtgaacagttagcaggctggctgggctttgcttcggcgacccgtaacagtctcgacagcgtttctgaccgtgaccatgtgttggaactgctttctgctgccgctatcggcatggtgcatctgtcgcgttttgctgaagatctgattttctttaacaccggcgaagcggggtttgtggagctttctgaccgtgtgacttccggttcatcattaatgccgcagaagaaaaacccggatgcgctggagctgattcgcggtaaatgcggtcgggtgcagggggcgttaaccggcatgatgatgacgctgaaaggtttgccgctggcttacaacaaagatatgcaggaagacaaagaaggtctgttcgacgcgctcgatacctggctggactgcctgcatatggcggcgctggtgctggacggcattcaggtgaaacgtccgcgttgccaggaagcggcgcagcagggttacgccaacgctactgaactggcggattatctggtggcgaaaggcgtaccgttccgcgaggcgcaccatattgtgggtgaagcggtggtggaagccattcgtcagggcaaagcgctggaagatctgccgctcagtgagttgcagaaattcagccaggtgattggcgaagatgtctatccgattctgtcgctgcaatcgtgcctcgacaagcgtgcagcaaaaggcggtgtctcaccgcaacaggtggcgcaggcgattgcttttgcgcaggcgcggttggggtaatttgtttatattgctcccctgaaaatggggagcttaccacgcctacaaagtgtgacacttcgtaggcggataaggcgtttacgccgcatcaggcagaaatttgtcagtattctggtgaccttaaatttaacgcccaaccagaaccattatttgtcacattcctttttattcttgcgtcttctttaccttcactctccccataaaaattatattttcaatacatcagccaatacatactttaattaattgaatataatttatttctattgttgtgttcatttttaatgattaatggagtttgttatgtgattatttaacgtgttgttttaacgatgatggctaattattcaggtggtttttgagggtgttttttctcctcggtagaaatttttatttttaatgtgatcacggttgaataatcactttttctctcttgtatggtagtaggcgtaaaattaagtttgaagtgtctatttacaatacaggagattgcaataatgaaaattattgctgtggatgtttttgttacttgtcccgggcgtaatttcgttacgcttaaaataaccactgaaagcggactttgtggattaggagatgccacgttaaatggtcgcgaattgtcggtcgcttcttatctgaaagatcatctttgtcctcaattaattggccgcgatgccagccgtatcgaagatatctggcaattcttttataaaggagcttactggcgacgtggtcccgtcacgatgtcggccatttctgccattgatatggcgttgtgggatatcaaagctaaagcggcaaatatgccattgtatcaactgcttggtggcgcttctcgtgaaggcgtgatggtttattgccacaccaccgggcggacgattgatgaagtccttgaagactatgcaaagcaccagcagatgggctttaaggcgattcgtgtgcagtgtggtgtaccgggtatgcaaaccacctatggtctggcgaagggcaaaggactggcgtatgaaccagcaaccaaaggcctgtggccagaagagcagttgtggtcttcagaaaagtatctcgattttacgccgaagttatttgaagcggtgcgtaataagttcggttttaacgaacatctgttgcatgacatgcaccatcgcctgacccccatcgaagcggcgcgctttgggaggagcattgaggattaccgcctgttctggatggaagatccgacgcctgccgagaaccaggaatgttttcgtctgattcgccagcataccgtgacgccgattgcggtcggtgaagtgtttaacagtatctgggactgcaaacagttaatcgaagagcagctgattgactatattcgcacgacgattacccatgcaggcggcattaccgggatgcgacggattgccgattttgcatcgctttatcaggtacgtaccggttcgcatggcccttcagatttatcgcctgtttgtcatgcggcggcgctgcattttgacctctgggtgccaaactttggcgttcaggagtacatgggctattccgaacaaatgcttgaagtcttcccgcacagctggcgcttcgatgaaggttatatgcacccaggcgatgaaccggggctgggtatttctttcgatgagaaactggcggcgaaatatccgtatgacccggcgtatctccccgtcgcacgactggaagatggcacattgtggaactggtaatagcggttcgcttaattattttctgaatattcatcaaatcgattaattccgctcaaggagctaaaaatggacgttgatgtgtcaaccagtgttgcgggtaataaaccgcaacggattcgtcgtattcagacagtgaccctggttttattatttatggcggggatcgttaattttctcgaccgttcgtcattgagcgtggcaggtgaagcaattcgtggcgagttaggattatccgctaccgagtttggtgttttgctttctgcattttctctgtcttatggtttttcacaacttccttccggtattttgctagaccgctttggcccacgaatagtgttaggcgcaggcttaatattctggtcattaatgcaggcattaacaggaatggttaattcttttagccactttattttaatgcgtatcggtctgggtattggcgaagcgccatttatgcctgcgggagtaaagtcgatcaccgactggtatgcgcaaaaagaacgcggcacggcgctggggatttttaactcatctaccgttatcggtcaggctatcgcgcctcctgctcttgtattgatgcaactggcatggggctggcggacgatgtttgtcatcatcggcgtagcagggattctggttgggatctgttggtacgcgtggtatcgcaaccgggcgcagtttgtcctgaccgaggaagaacggacatatctctccgcgccggttaaaccgcgtccacagttacaatttagcgagtggctggcgctgtttaagcatcggacaacctgggggatgattttaggtttctctggcgtcaattataccggttggctctacatcgcgtggttacccggttatttgcaggccgaacaaggtttcagtctggcgaaaaccggttgggtggcggcaattcctttcctcgcggcggcggtcgggatgtgggttaacggtattgttgtcgatcggctggcgaaaaaaggctatgacctggcgaagacgcgtaaaacggctattgtctgcggtttgatgatgtcggcattaggcacgttgctggtcgtgcaatcttcctcgccagcccaggcggtagcgtttatctcaatggcgctgttctgcgtgcatttcgcgggaacatctgcatgggggctggtgcaggtgatggtgtcagaaacaaaagtggcttccatcgccgggattcaaaactttggcagttttgtttttgcttcctttgctccgatcgtaaccggttgggtcgtggataccacacactcgtttaatctggcgctggttatcgcggcctgtgtgacgttcaccggggcgctgtgttacttctttattgtcaaagatcggattgagtaaccgttactatcaggctctcttgctgtgggcctgtagaataaaaaaaagcggatcctggagatccgcaaaagttcacgttggctttagttattcgagttgagaaactctcgaaacgggcagtgacttcaagggttaaaagaggtgccgctccgtttctgtgagcaattatcagtcagaatgcttgatagggataatcgttcgttgctatgctacctatcgccgcgaactatcgtggcaatggaggatggataatgaatattcgtgatcttgagtacctggtggcattggccgaacaccgccattttcggcgtgcggcagattcctgccacgttagccagccgacgcttagcgggcaaattcgtaagctggaagatgagttgggcgtgatgttgctggagcggaccagccgtaaagtgttgttcacccaggcgggaatgctgctggtggatcaggcgcgtaccgtactgcgtgaggtgaaagtccttaaagagatggcaagccagcagggcgagacgatgtccgggccgctgcatattggtttgattcccacggttggaccgtacctgctaccgcatattatcccgatgctgcaccagacctttccaaagctggaaatgtatctgcatgaagcacagacccaccagttactggcgcaactggacagcggcaaactcgattgcgtgatcctcgcgctggtgaaagagagcgaagcattcattgaagtgccgttgtttgatgagccaatgttgctggctatctatgaagaccacccgtgggcgaaccgcgaatgtgtaccgatggccgatctggcaggggaaaaactgctgatgctggaagatggtcactgtttgcgcgatcaggcaatgggtttctgttttgaagccggggcggatgaagatacacacttccgcgcgaccagcctggaaactctgcgcaacatggtggcggcaggtagcgggatcactttactgcctgcgctggctgtgccgccggaacgcaaacgcgatggggttgtttatctgccgtgcattaagccggaaccacgccgcactattggcctggtttatcgtcctggctcaccgctgcgcagccgctatgagcagctggcagaggccatccgcgcaagaatggatggccatttcgataaagtgttaaaacaggcggtttaagccatttagcgcagctacccgataggcttccgccatcgtcgggtagttaaaggtggtgttgacgaagtactcaatagtgttgccgccacctttctgttccataatcgcctgaccgatatgaataatttcggcagcgcgctcgccaaagcagtgaatacccagaatctcttttgtttcccgatggaacaaaattttcagcgtgcccacgttcatgccgacgatttgtgcacgtgccagatgtttaaactgggcgcggcccacttcatatggcactttcatcgcggtcagctgctgttcggttttgcctacagagctgatttccgggatggtgtaaatgccggtagggatatcttcaatcagatgtgcgttggcttcacctttcaccagcgcctgcgcggcaatgcgcccctggtcataggctgccgacgccaggctcggataaccaatcacgtcgcccaccgcgtaaacgtgcggctgtgcggtctgatacatgctgttgaccttcagctgtccgcgactgtcagtttccagcccaatgttctgtaacgccagcgaatcggtattaccggtgcgaccgttggcatagagcagacagtcagctttcagttttttacccgacttcagatgcatgatcacaccgtcgtcacagccttcgatcttctcgtactcttcgttgtgacgaatcactacgccactgttccagaagtgataggagagagaatctgacatctcttgatcgagaaatgccagcaggcgatcgcgggtgttgatcagatccacttttacatccataccgcggaagatcgacgcatattcacagccgatcactccagcaccgtaaataagtacatggcgcggttcgtggtgcatgctaagaattgagtcgctgtcataaatgcgtggatgggtgaaatcaacatctgttggatgatatggacgagagccgcaggcaataacaaatttttcagcagttagtgtttcgacgctgccgtccgggcaatccagcgccaacgtatgctcatcaacaaagcgagcgttcccctgcaatatttcacagtgattacgttcgtaaaatccctgacgcatgcgcgtttgttgattaatcacgttatcggcatggttaaggatatcggcaaaagaagagcggagcagtcgggaatggtcgctgtatagtgggttttgattgaattctataatgcggctgacggcgtgacggagagctttcgacgggatggtgccccagtgggtgcaaccgccgccaacattttgataacgctcgataactgcgacgcgcgcaccttgcttaaccaggcccatcgcagcgccttcgccgccggggccggaacctattactatggcatcgtaatcgtaggaatgtggcatggtagggcttacctgttcttatacataaaagcaacagaatggtaacattttatcgcgggtaagccaattgatccccgtcatttatctggctatatcgtgagcggcctttgctttgtcttcctccttcttattttatttattcactattaatcgctttttcttatggctgatagttttatcttgccgaagcgtgcttttttgttattgtctttatgaaatcttcttataaaacaaatatataaatattttatattgatgagttatttgtatttataccatcaataaaatccgttaattagcctgtttataagtgaataaaggaatagccgatgatcgaacactatattcgtgggtttgaggaagaacttcgcgagatccgccatcagatccacgaaaacccggagctgggattacaagaatttaaaaccagtgctttggttgcggaaaagctgcgccagtggggctatgaggttgagcaagggctggcgacaaccggcgtggtagccacgttaaaagtgggcgacggagagaaaagtattggcctgcgggcggatatggatgcgttgccgatttatgaaaatagtggcaagccctgggccagtaaacatcctggtttaatgcacgcctgcgggcatgacgggcataccaccatactgctgggggctgcgcgttattttgccgaaacccgccgttttaacggcacgttacgccttatcttccagcctgcggaagagatgattaacggcggtgagatcatggttaaagaggggctttttgatcgtttcccctgcgatgtcattttcgggatgcacaacatgccgggtttgccggtcggcaagtttttcttccagcctggggcgctgatggcgtcaatggatcagttccatattacggttcgtggttgtggcggacacggtgcgatcccgcacaaagccatcgatccagtgctggttgctgcacatatcaccaccgcattacaaagcattgtgtcgcgcaatgtcgatccgctggaagcggcggtaattaccgtcggcagcattgttgcgggtgaggcggctaacgtcattcctgacagtgctgagatgaaaatcagtgtccgctctcttagccgcgatacccgacaacttcttctgacccgtattcctgctcttgcacaagcccaggctgccagctttggcgctacggctgaggttacgcatgttaacggtacaccggtattagtaaatgacgaggagatggcgcgcttcgcctggcaggtggcgtgcaaaacatttggtgaagatcgggctgagtttggcatcaaacccctgatgggcagtgaagatttctctttcatgctggaagcccaacccaaaggcggtttcctgttattcggtaatggcgatgtcggggaaggttcctgcatggtgcataaccccggttacgactttaacgatgcaagcctggtcccggcaagcagctactggggcgcactggttgaagcctggctgcaataaataaaacaacacacaacaacactttttggcaaggaacatggaatgacggcgatcgtaaatgaaaccgtgagtgtgaagaaaaagcccagcggcaggcgggtgatctttgcctcggcgtttggcaatgcgctcgaattttttgattttggcgtttacaacttttttgtggtctatatcagtacgcttttcttcccacccagtgccgatcataacgtcgcgctgttactggcatttgcaacgtttggtgtgagcttttttatgcgtccgctcggtgggattatcgttggtgcctgggccgatcgcttcgggcgtaaaccggcgatggtgttcactattgctctgatgagcctcggtacgctgatgatcggcatcgcaccgacgtatgaaacggcgggctattggggaaccgcaacgctggtgctggcgcgtctaattcagggtgttgcggcaggtggtgaagtcggggcttcaatgtcgctactggtggagtcagctccggcaaatcgtcgcggcttttacagcagttggtcactggcgacccaagggctggcaacgaccttcggtggggttgttgctttaggtctgagcgcatggctaccgttcgccacaggttcagaaaccgtaatggcagaatggggctggcgtgtgccgttttttattggcgtgttattagcacctatcggttgctggttgcgtctgagcctggaaaatgacgtacctgagccagtgcgcaataaaaaagctgctaccagcgaaagcgcgttttctctgctcctgcaacataaggcgactatcgttaatggcgttttactcgctattggtagcacggtcgcaacctatatctccctcttttattacggcacctgggcggcgaagtatctggcgatgcctcaacattattctcatgcagcgatgttactggcgggggtaattacgtttgtgggtgcgctgttggtggggatgctatgtgattcggttgggcgtaaaaagctgattttaatctcccgtgtgatggtgcttctctgtagctggccgtcattctggctgttggtgaattacccaagccctggcatgttgctgacggtggttttcgtgatggtcagctttaccacgcttggcggtgtgccagtgatgttgttgatctctgaactgttgccgaaacggattcgggcattaggtttcgcgctggtttatagcattggcgtagcaatctttggcggttttgcgcaatatttcgccacgcaatccatcgtgttgctggatagtctgacggctccggcgtggtatctggggggaggcacgttgctgtcgatgctggcgttgttgtacgtaaaagaaccggccaaagaattgcagtaaatatgttttattgcgttaccgttcattcacaacactggagcaatccagtatgttcattctctggtatagtgccagcagtacttttggcaaggattcagacatcgtgatgggcgtaagagcgcaacaaaaagaaaaaacccgccgttcgctggtggaagccgcatttagccaattaagtgctgaacgcagcttcgccagcctgagtttgcgtgaagtggcacgagaagcaggcattgctcccacctctttttatcggcatttccgcgacgtagacgaactgggtctgaccatggttgatgagagcggtttaatgctacgccaactcatgcgtcaggcgcgtcagcgtatcgccaaaggcgggagtgtgatccgcacctcggtctccacatttatggagttcatcggtaataatcctaacgccttccggttattattgcgggaacgctccggcacctccgctgcgtttcgtgccgccgttgcgcgtgaaattcagcacttcattgcggaacttgcggactatctggaactcgaaaaccatatgccgcgtgcgtttactgaagcgcaagccgaagcaatggtgacgattgtcttcagtgcgggggccgaggcgttggatgtcggcgtcgagcaacgccggcaattagaagagcgactggtactgcagctgcgaatgatttcgaaaggggcttattactggtatcgccgtgaacaagagaaaaccacaattattccgggaaatgtgaaggacgagtaatgaaacaagcaaatcaagatagaggtacgctgctgctagcgttggttgctggcttatcgatcaatggtacttttgcagcgctgtttagctccattgtaccattttctgtattcccgattatttccctggtgttgacagtttactgcctgcatcaacgttatcttaatcgcactatgccggtaggcttgccgggtctggcagctgcttgttttattctcggcgtactgctgtacagcacggtagttcgtgcggaatatccggatatcggctctaacttcttcccggcagtactgtccgtcattatggtgttctggattggcgcgaagatgcgtaaccgtaagcaggaagttgctgagtaatcggtatcatgccggatgcaagcgcatccggcatgggttttacttcgcggtcagtaatacgccgcactccatatggtgcgtgtaggggaactgatcaaatagagccagacgttcgaccttgtgcgtctggcttaatgtttccagattcttgcataacgtttccggattgcaggagatatacagaatacgtggatacgcctgcaccattttctcggtttcactgtccagaccgctgcgcggtgggtcgacaaaaatggtttcgcactgataactctttaagtcgattccttgcaggcggttaaactcgcgcacaccattcatcgcctgagtaaattcttctgccgccatacgaataatttgtacgttatcaatatggttagcggcaatgttgtattgcgcggcggcgactgacggcttggcgatttcggtggctaatacccgatcaaaattgcgtgccagcgctaatgaaaagttaccgttgccgcagtatagctccagtaaatcgccttttgagcctttggttacgtccagcgcccattccagcatctgaatattcatcgccgcgttcggttgggtaaagctgttttctacctgacggtagatcatctctttccccgcgatcggcagacgttcgtcgatgtaatcctgatccagcgcgattttggttttcgttgcccgaccaatcagatgcacattcagattctgcgcgcgcagtgcatcgcgcagggcttccgcctgctgacgccactcatcatccagctttttatggtacagcaaggaaacaaccgcttgattgcttagcgtagtgaggtaatcaatctggaacaacttgtggcgcagaatgggattattacgcacacccgcaatcatcgccgtcatcaactggttgataagttcactggcggcggggaagctatccacacggatacgacttttggtttgttgatcgaaaatgatgtggtacaggtcatcgccatcgtgccagatgcggaactccgcacgcatccgataatgactgaccggcgagcgaaacacttccggaaccaggtcagaaaacggtgccatcatactttgcaaacgtaccactttttcggctaactgcgcttcatactgttctgttggaaggtgttcgggggtcatgatgtatcctgaaaaattaaagtacgcggcgattgtagggattgctcatcagatgtccagatcttgatgaattcctatttgtgagctacgtctggacagtaacttgttacaacctgtagcatccacttgccggtcctgtgagttaatagggaatccagtgcgaatctggagctgacgcgcagcggtaaggaaaggtgcgatgattgcgttatgcggacactgccatccggtgggaagtcatcatctcttagtatcttagatacccctccaagcccgaagacctgccggccaacgtcgcatctggttctcatcatcgcgtaatattgatgaaacctgcggcatccttcttctattgtggatgctttacaatgattaaaaaagcttcgctgctgacggcgtgttccgtcacggcattttccgcttgggcacaggataccagcccggatactctcgtcgttactgctaaccgttttgaacaaccgcgcagcactgtgcttgcgccaactactgttgtgacgcgtcaggatatcgaccgctggcagtcgacctcggtcaatgatgtgctgcgccgtcttccgggcgtggatatcacccaaaacggcggttcaggtcagctctcatctatttttattcgcggtacaaatgccagtcatgtgttggtgttaattgatggcgtccgcctgaatttggcgggggtgagtggttctgctgatcttagtcagttccctattgcgcttgtccagcgtgttgaatatatccgtgggccgcgctccgctgtttatggttcagatgcaataggcggggtcgtgaatatcatcacgacgcgcgatcaccccggaacggaaatttcagcagggtggggaagcaatagttatcagaactatgatgtctctacacagcaacaactgggggataagacacgggtaacgctgttgggcgattatgcccatactcatggttatgatgttgtcgcctatggtaataccggaacgcaagcgcagccagataacgatggttttttaagtaaaacgctttatggcgcgctggagcataattttactgatgcctggagcggctttgtgcgcggctatggctatgataatcgtaccaattatgacgcatattattctcccggcttgccactggtcgatacccgtaaactctatagccaaagttgggatgccggactgcgctataacggcgaactgattaaatcacaactgattaccagctacagccatagcaaagattacaactacgatccgcattatggtcgttatgattcgtccgcgacgctcgatgagatgaaacagtacaccgtccagtgggcaaacaacatcatcattggccacggtaatattggtgcgggtgttgactggcagaagcagagcacggcaccgggcacagcttatgttgaggatggatatgatcaacgtaataccggcatctatctgactgggctgcagcaagtcggcgattttacttttgaaggcgcaggacgcagcgacgataattctcagtttggtcgtcatggtacctggcaaaccagcgccggttgggagttcatcgaaggttatcgctttattgcttcctacggaacatcttataaggcaccaaatcttgggcaactgtacggctcctacggtaatccgaatctgaatcctgagaaaagcaaacaatgggaaggcgcgtttgaaggcttaactgctggggttaactggcgtatttccggatatcgtaacgatgtcagtgacttgatcgattatgatgatcacaccctgaaatattacaatgaagggaaagcgcggattaagggtgtcgaggcgaccgctaattttgataccggaccactgacgcatactgtgagttatgattatgttgatgcgcgcaatgcgattactgacacgccgttgttacgccgtgctaaacagcaggtgaaataccagctcgactggcagttgtatgacttcgactgggggattacttatcagtatttaggcactcgctatgataaggattactcctcttatccttatcaaaccgttaaaatgggcggtgtgagcttgtgggatcttgcggttgcgtatccggtcacctctcacctgacagttcgtggtaaaatagccaacctgttcgacaaagattacgagacagtctatggctaccaaactgcaggacgggaatataccttgtctggcagctacaccttctgaaccacgtcccaccgtgctggtgtttgactccggcgtcggtgggttgtcggtctatgacgagatccggcatctcttgccggatctccattacatttatgctttcgataacgtcgctttcccgtatggcgaaaaaagcgaagtgtttattgttgagcgagtggtggaaattgtcaccgcagtgcaagaacgttatccccttgcgctggctgtggtcgcttgcaacaccgccagtaccgtttcacttcctgcattacgcgaaaagttcgacttcccggttgttggtgtcgtgccggcgattaaacctgctgcacgtctgacggcaaatggcattgtcggattactggcaacccgcggaactgttaaacgttcttatactcatgagctgatcgcgcgtttcgctaatgaatgccagatagaaatgctgggctcggcagagatggttgagttggctgaagcgaagctgcatggcgaagatgtttctctggatgcgctaaaacgtatcctacgcccgtggttaagaatgaaagagccgccagatacagttgtattgggttgcacccatttccctctactacaagaagaactattacaagtgctgccagagggaacccggctggtggattctggcgcagcgattgctcgccgaacggcctggttgttagagcatgaagccccggatgcaaaatctgccgatgcgaatattgcattttgtatggcaatgacgccagaagctgaacaattattgcccgttttacagcgttacggcttcgaaacgctcgaaaaactggcagttttagattgatttggttgaatgttgcgcggttagaaaattattttaaatttcctcttgtcaggccggaataactccctataatgcgccaccactgacacggaacaacggcaaacacgccgccgggtcagcggggttctcctgagaacttcggcagagaaagcaaaaataaatgcttgactctgtggcgggaaagcgtattatgcacaccccgcgccgctgagaaaaagcgaagcggcactgctctttaacaatttatcagacaatctgtgtgggcactcgaagatacggattcttgacgtcgcaagacgaaaaaatgaataccaagtctcaagagtgaacacgtaattcattacgaagtttaattctttgagcatcaaacttttaaattgaagagtttgatcatggctcagattgaacgctggcggcaggcctaacacatgcaagtcgaacggtaacaggaagcagcttgctgctttgctgacgagtggcggacgggtgagtaatgtctgggaaactgcctgatggagggggataactactggaaacggtagctaataccgcataacgtcgcaagaccaaagagggggaccttcgggcctcttgccatcggatgtgcccagatgggattagctagtaggtggggtaaaggctcacctaggcgacgatccctagctggtctgagaggatgaccagccacactggaactgagacacggtccagactcctacgggaggcagcagtggggaatattgcacaatgggcgcaagcctgatgcagccatgccgcgtgtatgaagaaggccttcgggttgtaaagtactttcagcggggaggaagggagtaaagttaatacctttgctcattgacgttacccgcagaagaagcaccggctaactccgtgccagcagccgcggtaatacggagggtgcaagcgttaatcggaattactgggcgtaaagcgcacgcaggcggtttgttaagtcagatgtgaaatccccgggctcaacctgggaactgcatctgatactggcaagcttgagtctcgtagaggggggtagaattccaggtgtagcggtgaaatgcgtagagatctggaggaataccggtggcgaaggcggccccctggacgaagactgacgctcaggtgcgaaagcgtggggagcaaacaggattagataccctggtagtccacgccgtaaacgatgtcgacttggaggttgtgcccttgaggcgtggcttccggagctaacgcgttaagtcgaccgcctggggagtacggccgcaaggttaaaactcaaatgaattgacgggggcccgcacaagcggtggagcatgtggtttaattcgatgcaacgcgaagaaccttacctggtcttgacatccacggaagttttcagagatgagaatgtgccttcgggaaccgtgagacaggtgctgcatggctgtcgtcagctcgtgttgtgaaatgttgggttaagtcccgcaacgagcgcaacccttatcctttgttgccagcggtccggccgggaactcaaaggagactgccagtgataaactggaggaaggtggggatgacgtcaagtcatcatggcccttacgaccagggctacacacgtgctacaatggcgcatacgaagagaagcgacctcgcgagagcaagcggacctcataaagtgcgtcgtagtccggattggagtctgcaactcgactccatgaagtcggaatcgctagtaatcgtggatcagaatgccacggtgaatacgttcccgggccttgtacacaccgcccgtcacaccatgggagtgggttgcaaaagaagtaggtagcttaaccttcgggagggcgcttaccactttgtgattcatgactggggtgaagtcgtaacaaggtaaccgtaggggaacctgcggttggatcacctccttaccttaaagaagcgtactttgcagtgctcacacagattgtctgatagaaaagtgcgtcgtagtccggattggagtctgcaactcgactccatgaagtcggaatcgctagtaatcgtggatcagaatgccacggtgaatacgttcccgggccttgtacacaccgcccgtcacaccatgggagtgggttgcaaaagaagtaggtagcttaaccttcgggagggcgcttaccactttgtgattcatgactggggtgaagtcgtaacaaggtaaccgtaggggaacctgcggttggatcacctccttaccttaaagaagcgtactttgcagtgctcacacagattgtctgatagaaagtgaaaagcaaggcgagaacgtcgtccccttcgtctagaggcccaggacaccgccctttcacggcggtaacaggggttcgaatcccctaggggacgccacttgctggtttgtgagtgaaagtccgaccttaatatctcaaaactcatcttcgggtgatgtttgagatatttgctctttaaaaatctggatcaagctgaaaattgaaacactgaacaacgagagttgttcgtgagtctctcaaattttcgcaacacgatgatgaatcgcaagaaacatcttcgggttgtgaggttaagcgactaagcgtacacggtggatgccctggcagtcagaggcgatgaaggacgtgctaatctgcgataagcgtcggtgaggtgatatgaaccgttataaccggcgatttccgaatggggaaacccagtgtgtttcgacacactatcattaactgaatccataggttaatgaggcgaaccgggggaactgaaacatctaagtaccccgaggaaaagaaatcaaccgagattcccccagtagcggcgagcgaacggggaggagcccagagcctgaatcagtgtgtgtgttagtggaagcgtctggaaaggcgtgcgatacagggtgacagccccgtacacaaaaatgcacatactgtgagctcgatgagtagggcgggacacgtggtatcctgtctgaatatggggggaccatcctccaaggctaaatactcctgactgaccgatagtgaaccagtaccgtgagggaaaggcgaaaagaaccccggcgaggggagtgaaaaagaacctgaaacgtgagacagttcggtccctatctgccgtgggcgctggagaactgaggggggctgctcctagtacgagaggaccggagtggacgcatcactggtgttcgggttgtcatgccaatggcactgcccggtagctaaatgcggaagagataagtgctgaaagcatctaagcacgaaacttgccccgagatgagttctccctgactccttgagggtcctgaaggaacgttgaagacgacgacgttgataggccgggtgtgtaagcgcagcgatgcgttgagctaaccggtactaatgaaccgtgaggcttaaccttacaacgccgaagatgttttggcggatgagagaagattttcagcctgatacagattagattaaccggcgacaagcgggttaatgaaacagaatttgcctggcggccttagcgcggtggtcccacctgaccccatgccgaactcagaagtgaaacgccgtagcgccgatggtagtgtggggtctccccatgcgagagtagggaactgccaggcatcaaattaagcgaagagcccagtcggaagactgggcctttttgcgtttctataaactcttcctgtcgtcatatctacaagccatccccccacagatacggtaaactagcctcgtttttgcatcaggaaagcagctatgaaccactccttaaaaccctggaacacatttggcattgatcataatgctcagcacattgtatgtgccgaagacgaacaacaattactcaatgcctggcagcatgcaaccgcagaaggacaacccgttcttattctgggtgaaggaagtaatgtactttttctggaggactatcgcggcacggtgatcatcaaccggatcaaaggtatcgaaattcatgatgaacctgatgcgtggtatttacatgtaggagccggagaaaactggcatcgcctggtaaaatacactttgcaggaaggtatgcctggtctggaaaatctggcattaattcctggttgtatcggctcatcacctatccagaatattggtgcttatggcgtagaattacagcgagtttgcgcttatgttgattgtgttgaactggcgacaggcaagcaagtacgcttaactgccaaagagtgccgttttggctatcgagacagtatttttaaacatgaataccaggatcgcttcgccattgtagccgtaggtctgcgtctgccaaaagagtggcaacctgtactgacgtatggtgacttaactcgcctggatccttcaacggtaacgccacagcaagtatttgatgcggtgtgtcatatgcgcaccaccaaactccctgatccaaaagtgaacggtaatgcgggtagtttcttcaaaaatcctgttgtttctgccgaaactgctaacgcgttgttggcacaatttccaacagccccacattacccccaggtggatggttcagtaaaactggctgcaggttggcttattgatcagtgccagcttaaagggacgcaaattggtggggctgcggtacaccgtcaacaggcgctggttctcataaatgagcacgatgcaaaaagcgaagatgttgtacagctggcgcatcatgtaagacaaaaagtgggtgaaaaatttaatgtctggcttgagcctgaagtccgctttattggtgcatcaggtgaagtgagcgcagtggagacaatttcatgaaggataacaccgtgccactgaaattgatcgccctgttagcgaatggcgaatttcactctggcgagcagttgggtgaaacgctgggaatgagccgggcggctattaataaacacattcagacactgcgtgactggggcgttgatgtatttactgttccgggtaaaggatacagcttgcccgagccaatccagttacttaatgccgaaaagatattgagtcagctggatgacggcagtgtagccgtgctgccagttattgactccacgaatcagtatctcctggaccgcatcggagagcttaaatctggcgatgcctgtgttgcagaataccagcatgctggccgtggtcgtcgtggtcggaaatggttttcgccttttggcgcgaacttatatttgtcgatgttctggcgtctggaacagggcccggcggcggcgattggtttaagtctggttatcggtatcgtgatggcggaagtattacgcaagctgggtgcagataaagttcgtgttaaatggcctaatgacctctatctgcaggatcgcaagctggcaggcattcttgtggagctgactggcaaaaccggcgatgcggcgcaaatagtcattggtgcagggatcaacatggcaatgcgtcgtgttgaagagagtgtcgttaatcaagggtggatcacgctgcaggaagccgggatcaatctcgatcgtaatactcttgcggccatgctgatacgtgaattacgcgcggcgctggaactcttcgagcaagaaggattgacaccttatctttcgcgctgggaaaagttggataattttattaatcgcccagtgaaacttatcattggtgataaagaaatatttggcatttcacgcggaatagacaaacagggtgctttattacttgagcaggatggaataataaaaccctggatgggcggtgaaatatccctgcgtagtgcagaaaaataagaaaggggagcattaactcccctttaaattatttgcgtagtctgacctcttctactgcatgattagcacttttcgtcaggattaaactggcacgctcgcgagtaggtagaatattttgctttaagttcagccagttgatctctttccacaatgtcatggcagtcttaatagcttcttctttagttaatttcgcgtagttatgaaaataggaatccgggtctgtaaaagccccttcgcggaatttcagaaaacggttgatataccacgtctgaagtaagtcttccggtgcatcaacatatatcgaaaaatcgacaaaatcagaaacaaatacatgatgtggatcgtgtggataatccatcccgctctgtaagacatttaacccttcaagaattaaaatatcaggctgaacaacagttttatctccatccgggatcacatcataaataagatgcgagtaaacaggggctgtaacgtttggcacgccggatttgagatcggaaacaaacttcaccaggcgatgcatatcatacgattccgggaagcctttcttcttcatcagaccacgttctttcagaacctgattagggtgaaggaagccatctgtagtgatcagttcaacacgacgatgttccggccaacggcttaatagcgcctgcaatacacgggcggttgtacttttccccaccgcgacactaccagcaatactgataatgtaaggaatgcgttgcccgttggtaccaagaaactgttccagaactgcctgacggcgcagattcgagcttatatagaagttcagcaaacgtgacagaggtaaatagatctcggcaacttcttctaacgagagatcttcattaatacctttgagacgggcgatctcatcttccgataacgtcataggtacggaatcacgcagagctgcccactggttgcggtcaaactgtaggtaaggcgtcattaacgtttgctcttttatactcataagcatgtttctggcggtcatagctctatcggcaaagcgatatttgccatggcgcgtcacagttctgttgaatgggttaatgggcaggagggtaacaccagatggggaggaataataagaaaaaatctctcccaggaagctatcgttgaaaagcaatgtgacagatattccatctgataaaaagaattatggtttagcaggagcacattgttgagcacaatgatgttgaaaaagtgtgctaatctgccctccgttcggctgtttcttcatcgtgtcgcataaaatgtgaccaataaaacaaattatgcaattttttagttgcatgaactcgcatgtctccatagaatgcgcgctacttgatgccgacttagctcagtaggtagagcaactgacttgtaatcagtaggtcaccagttcgattccggtagtcggcaccatcaagtccggtggggttcccgagcggccaaagggagcagactgtaaatctgccgtcacagacttcgaaggttcgaatccttcccccaccaccaatttcggccacgcgatggcgtagcccgagacgataagttcgcttaccggctcgaataaagagagcttctctcgatattcagtgcagaatgaaaatcaggtagccgagttccaggatgcgggcatcgtataatggctattacctcagccttccaagctgatgatgcgggttcgattcccgctgcccgctccaagatgtgctgatatagctcagttggtagagcgcacccttggtaagggtgaggtcggcagttcgaatctgcctatcagcaccacttcttttctcctccctgttttttccttctgtttattgcattcaacaagtcgggcatgttgcctggttgatgtggtgatatcaccgatttatccgtgtcttagagggacaatcgatgtctaaagaaaagtttgaacgtacaaaaccgcacgttaacgtcggtactatcggccacgttgaccatggtaaaacaacgctgaccgctgcaatcactaccgtactggctaaaacctacggcggtgctgctcgcgcattcgaccagatcgataacgcgccggaagaaaaagctcgtggtatcaccatcaacacttctcacgttgaatatgacaccccgacccgtcactacgcacacgtagactgcccggggcacgccgactatgttaaaaacatgatcaccggtgctgctcagatggacggcgcgatcctggtagttgctgcgactgacggcccgatgccgcagactcgtgagcacatcctgctgggtcgtcaggtaggcgttccgtacatcatcgtgttcctgaacaaatgcgacatggttgatgacgaagagctgctggaactggttgaaatggaagttcgtgaacttctgtctcagtacgacttcccgggcgacgacactccgatcgttcgtggttctgctctgaaagcgctggaaggcgacgcagagtgggaagcgaaaatcctggaactggctggcttcctggattcctacattccggaaccagagcgtgcgattgacaagccgttcctgctgccgatcgaagacgtattctccatctccggtcgtggtaccgttgttaccggtcgtgtagaacgcggtatcatcaaagttggtgaagaagttgaaatcgttggtatcaaagagactcagaagtctacctgtactggcgttgaaatgttccgcaaactgctggacgaaggccgtgctggtgagaacgtaggtgttctgctgcgtggtatcaaacgtgaagaaatcgaacgtggtcaggtactggctaagccgggcaccatcaagccgcacaccaagttcgaatctgaagtgtacattctgtccaaagatgaaggcggtcgtcatactccgttcttcaaaggctaccgtccgcagttctacttccgtactactgacgtgactggtaccatcgaactgccggaaggtgtagagatggtaatgccgggcgacaacatcaaaatggttgttaccctgatccacccgatcgcgatggacgacggtctgcgtttcgcaatccgtgaaggcggccgtaccgttggcgcgggcgttgtagcaaaagttctgagctaattgccgataacatttgacgcaatgcgcactaaaagggcatcatttgatgccctttttgcacgctttcgtaccagaacctggctcatcagtgattttctttgtcataatcattgctgagacaggctctgttgagggcgtataatccgaaaagctaatacgcgtttcgatttggtttgcctcgcgatcgcggggtgaaaatgtttgtagaatacttctgacaggttggtttatgagtgcgaataccgaagctcaaggaagcgggcgcggcctggaagcgatgaagtgggtcgttgtggtggcattgctcctggtagcgattgtcggcaactacctttatcgcgacattatgctgccgctgcgtgcgctggccgtagtaattctgattgctgcagcgggtggtgtcgcgctgttaacgacaaaaggtaaagcaaccgttgcttttgcccgtgaagcgcgtaccgaagtccgtaaggtcatttggccgactcgccaggaaacattgcacaccacgctgattgtggctgcggttaccgcagtaatgtcactgatcctgtggggactggatggtattctggttcgcctggtatcctttatcactggcctgaggttctgagatgtctgaagctcctaaaaagcgctggtacgtcgttcaggcgttttccggttttgaaggccgcgtagcaacgtcgctgcgtgagcatatcaaattacacaacatggaagagttgtttggtgaagtcatggtaccaaccgaagaagtggttgaaatccgtggcggtcagcgtcgcaaaagcgaacgtaaattcttccctggctacgtcctcgttcagatggtgatgaacgacgcgagctggcacctggtgcgcagcgtaccgcgtgtgatgggcttcatcggcggtacttccgatcgtcctgcgccaatcagcgataaagaagtcgatgcgattatgaaccgcctgcagcaggttggtgataagccgcgtccgaaaacgttgtttgaaccgggtgaaatggtccgtgttaatgatggtccgttcgctgacttcaacggcgttgttgaagaagttgattacgagaaatctcgtctgaaagtgtctgtttctatcttcggtcgtgcgacccctgtagagctggacttcagccaggttgaaaaagcttaactcagcgatcaaaaaagcggcgatttaatcgttgcacaaggcgcgagattggaatacaatttcgcgccttttgtttttatgggccttgcccgtaaaacgattttttatatcacggggagcctctcagaggcgttattacccaacttgaggaatttataatggctaagaaagtacaagcctatgtcaagctgcaggttgcagctggtatggctaacccgagtccgccagtaggtccggctctgggtcagcagggcgtaaacatcatggaattctgcaaagcgttcaacgcaaaaactgattccatcgaaaaaggtctgccgattccggtagtaatcactgtttacgctgaccgttctttcactttcgttaccaagactccgccggcagcagttctgctgaaaaaagcggctggtatcaagtctggttccggtaagccgaacaaagacaaagtgggtaaaatttcccgcgctcagctgcaggaaatcgcgcagaccaaagctgccgacatgactggtgccgacattgaagcgatgactcgctccatcgaaggtactgcacgttccatgggcctggtagtggaggactaagaaatggctaaactgaccaagcgcatgcgtgttatccgcgagaaagttgatgcaaccaaacagtacgacatcaacgaagctatcgctctgctgaaagaactggcgactgctaaattcgtagaaagcgtggacgtagctgttaacctcggcatcgacgctcgtaaatctgaccagaacgtacgtggtgcaactgtactgccgcacggtactggccgttccgttcgcgtagccgtatttacccagggtgcaaacgctgaagctgctaaagctgcaggtgctgaactggtaggtatggaagatctggctgaccagatcaagaaaggcgaaatgaactttgacgttgttattgcttctccggatgcaatgcgcgttgttggccagctgggccaggttctgggtccgcgcggcctgatgccaaacccgaaagtgggtactgtaacgccgaacgttgctgaagcggttaaaaacgctaaagctggccaggttcgttaccgtaacgacaaaaacggcatcatccacaccaccatcggtaaagtggactttgacgctgacaaactgaaagaaaacctggaagctctgctggttgcgctgaaaaaagcaaaaccgactcaggcgaaaggcgtgtacatcaagaaagttagcatctctaccaccatgggtgcaggtgttgcagttgaccaggctggcctgagcgcttctgtaaactaatgcctttacgtgggcggtgattttgtctacaatcttacccccacgtatgctaacgaaagttagcagctaaaaagatttgttcgttggagcctggcctatccaggcctccgtcgaagaccgcaggagtttcgcaagaaacttaatcccctgcgtagacggtgacagaacgctaagattattcttttatattctggcttgtttctgctcaccgtaattaagacgctctctccgtttggaggagtgaagtgagttccagagattttctctggcaaacatccaggagcaaagctaatggctttaaatcttcaagacaaacaagcgattgttgctgaagtcagcgaagtagccaaaggcgcgctgtctgcagtagttgcggattcccgtggcgtaactgtagataaaatgactgaactgcgtaaagcaggtcgcgaagctggcgtatacatgcgtgttgttcgtaacaccctgctgcgccgtgctgttgaaggtactccgttcgagtgcctgaaagacgcgtttgttggtccgaccctgattgcatactctatggaacacccgggcgctgctgctcgtctgttcaaagagttcgcgaaagcgaatgcaaaatttgaggtcaaagccgctgcctttgaaggtgagctgatcccggcgtctcagatcgaccgcctggcaactctgccgacctacgaagaagcaattgcacgcctgatggcaaccatgaaagaagcttcggctggcaaactggttcgtactctggctgctgtacgcgatgcgaaagaagctgcttaatcgcagttatctttttaacgcattcgcttacgtataaacttattctgatattcaggaacaatttaaatgtctatcactaaagatcaaatcattgaagcagttgcagctatgtctgtaatggacgttgtagaactgatctctgcaatggaagaaaaattcggtgtttccgctgctgctgctgtagctgtagctgctggcccggttgaagctgctgaagaaaaaactgaattcgacgtaattctgaaagctgctggcgctaacaaagttgctgttatcaaagcagtacgtggcgcaactggcctgggtctgaaagaagctaaagacctggttgaatctgcaccggctgctctgaaagaaggcgtgagcaaagacgacgcagaagcactgaaaaaagctctggaagaagctggcgctgaagttgaagttaaataagccaacccttccggttgcagcctgagaaatcaggctgatggctggtgactttttagtcaccagcctttttgcgctgtaaggcgccagtagcgtttcacactgtttgactactgctgtgcctttcaatgcttgtttctatcgacgacttaatatactgcgacaggacgcccgttctgtgtaaatcgcaatgaaatggtttaagcgtgatagcaacaggcattgcggaaagtgttccattttccggtcaacaaaatagtgttgcacaaactgtccgctcaatggacagatgggtcgacttgtcagcgagctgaggaaccctatggtttactcctataccgagaaaaaacgtattcgtaaggattttggtaaacgtccacaagttctggatgtaccttatctcctttctatccagcttgactcgtttcagaaatttatcgagcaagatcctgaagggcagtatggtctggaagctgctttccgttccgtattcccgattcagagctacagcggtaattccgagctgcaatacgtcagctaccgccttggcgaaccggtgtttgacgtccaggaatgtcaaatccgtggcgtgacctattccgcaccgctgcgcgttaaactgcgtctggtgatctatgagcgcgaagcgccggaaggcaccgtaaaagacattaaagaacaagaagtctacatgggcgaaattccgctcatgacggacaacggtacctttgttatcaacggtactgagcgtgttatcgtttcccagctgcaccgtagtccgggggtcttttttgactccgacaaaggtaaaacccactcttcgggtaaggtgctgtataacgcgcgcatcatcccttaccgtggttcctggctggacttcgaattcgatccgaaggacaacctgttcgtacgtatcgaccgtcgccgtaaactacctgcgaccatcattctgcgtgccctgaactacaccacagagcagatcctcgacctgttctttgaaaaagttatctttgaaatccgtgataacaagctgcagatggaactggtgccggaacgcctgcgtggtgaaaccgcatcttttgacatcgaagctaacggtaaagtgtacgtagaaaaaggccgccgcattactgcgcgccatattcgccagctggaaaaagacgacgtcaagctgatcgaagtcccggttgagtacatcgcaggtaaagtggttgctaaagactacattgatgagtctaccggcgagctgatctgcgcagcgaacatggagctgagcctggatctgctggctaagctgagccagtctggtcataagcgtatcgaaacgctgttcaccaacgatctggatcacggcccatatatctctgaaaccttacgtgtcgacccaactaacgaccgtctgagcgcactggtagaaatctaccgtatgatgcgccctggcgagccgccgactcgtgaagctgctgaaagcctgttcgagaacctgttcttctccgaagaccgctatgacttgtctgcggttggtcgtatgaagttcaaccgttctctgctgcgcgaagaaatcgaaggttccggtatcctgagcaaagacgacatcattgatgttatgaaaaagctcatcgatatccgtaacggtaaaggcgaagtcgatgatatcgaccacctcggcaaccgtcgtatccgttctgttggcgaaatggcggaaaaccagttccgcgttggcctggtacgtgtagagcgtgcggtgaaagagcgtctgtctctgggcgatctggataccctgatgcctcaggatatgatcaacgccaagccgatttccgcagcagtgaaagagttcttcggttccagccagctgtctcagtttatggaccagaacaacccgctgtctgagattacgcacaaacgtcgtatctcggcacttggcccaggcggtctgacccgtgaacgtgcaggcttcgaagttcgagacgtacacccgactcactacggtcgcgtatgtccaatcgaaacccctgaaggtccgaacatcggtctgatcaactccctgtccgtgtacgcacagactaacgaatacggcttccttgagactccgtatcgtaaagtgaccgacggtgttgtaactgacgaaattcactatctgtctgctatcgaagaaggcaactacgttatcgcccaggcgaactccaacctggatgaagaaggccacttcgtagaagacctggtaacttgccgtagcaaaggcgaatccagcttgttcagccgcgaccaggttgactacatggacgtatccacccagcaggtggtatccgtcggtgcgtccctgatcccgttcctggaacacgatgacgccaaccgtgcattgatgggtgcgaacatgcaacgtcaggccgttccgactctgcgtgctgataagccgctggttggtacgggtatggaacgtgctgttgccgttgactccggtgtaactgcggttgctaaacgtggtggtgtcgttcagtacgtggatgcttcccgtatcgtaatcaaagttaacgaagacgagatgtatccgggtgaagcaggtatcgacatctacaacctgaccaaatacacccgttctaaccagaacacctgtattaaccagatgccgtgtgtgtctctgggtgaaccggttgaacgtggcgacgtgctggcagacggtccgtccaccgacctcggtgaactggcgcttggtcagaacatgcgcgtagcgttcatgccgtggaatggttacaacttcgaagactccatcctcgtatccgagcgtgttgttcaggaagaccgtttcaccaccatccacattcaggaactggcgtgtgtgtcccgtgacaccaagctggggccagaagagatcaccgctgacatcccgaacgtgggtgaagctgcgctctccaaactggatgaatccggtatcgtttacattggtgcggaagtgaccggtggcgacattctggttggtaaggtaacgccgaaaggcgaaactcagctgaccccagaagaaaaactgctgcgtgcgatcttcggtgagaaagcgtctgacgttaaagactcttctctgcgcgtaccaaacggtgtatccggtacggttatcgacgttcaggtctttactcgcgatggcgtagaaaaagacaaacgtgcgctggaaatcgaagaaatgcagctcaaacaggcgaagaaagacctgtctgaagaactgcagatcctcgaagcgggtctgttcagccgtatccgtgctgtgctggtagccggtggcgttgaagctgagaagctcgacaaactgccgcgcgatcgctggctggagctgggcctgaccgacgaagagaaacaaaatcagctggaacagctggctgagcagtatgacgaactgaaacacgagttcgagaagaaactcgaagcgaaacgccgcaaaatcacccagggcgacgatctggcaccgggcgtgctgaagattgttaaggtatatctggcggttaaacgccgtatccagcctggtgacaagatggcaggccgtcatggtaacaagggtgtaatttctaagatcaacccgatcgaagatatgccttacgatgaaaacggtactccggtagacatcgtactgaacccgctgggcgtaccgtctcgtatgaacattggtcagatcctcgaaacccacctgggtatggctgcgaaaggtatcggcgacaagatcaacgccatgctgaaacagcagcaagaagtcgcgaaactgcgcgaattcatccagcgtgcgtacgatctgggcgctgacgttcgtcagaaagttgacctgagtaccttcagcgatgaagaagttatgcgtctggctgaaaacctgcgcaaaggtatgccaatcgcaacgccggtcttcgacggtgcgaaagaagcagaaattaaagagctgctgaaacttggcgacctgccgacttctggtcagatccgcctgtacgacggtcgcactggtgaacagttcgagcgtccggtaaccgttggttacatgtacatgctgaaactgaaccacctggtcgacgacaagatgcacgcgcgttccaccggttcttatagcctggttactcagcagccgctgggtggtaaggcacagttcggtggtcagcgtttcggggagatggaagtgtgggcgctggaagcatatggcgcagcatacaccctgcaggaaatgctcaccgttaagtctgatgacgtgaacggtcgtactaagatgtataaaaacatcgtggacggcaaccatcagatggagccgggcatgccagaatccttcaacgtattgttgaaagagattcgttcgctgggtatcaacatcgaactggaagacgagtaattctcgctcaaacaggtcactgctgtcggggtaaaacccggcagcggattgtgctaactccgacgggagcaaatccgtgaaagatttattaaagtttctgaaagcgcagactaaaaccgaagagtttgatgcgatcaaaattgctctggcttcgccagacatgatccgttcatggtctttcggtgaagttaaaaagccggaaaccatcaactaccgtacgttcaaaccagaacgtgacggccttttctgcgcccgtatctttgggccggtaaaagattacgagtgcctgtgcggtaagtacaagcgcctgaaacaccgtggcgtcatctgtgagaagtgcggcgttgaagtgacccagactaaagtacgccgtgagcgtatgggccacatcgaactggcttccccgactgcgcacatctggttcctgaaatcgctgccgtcccgtatcggcctgctgctcgatatgccgctgcgcgatatcgaacgtgtactgtacttcgaatcctatgtggttatcgaaggtggtatgaccaacctggagcgtcagcagatcctgactgaagagcagtatctggacgcgctggaagagttcggtgacgaattcgacgcgaagatgggtgcggaagcaatccaggccctgctgaagagcatggatctggagcaagagtgcgaacagctgcgtgaagagctgaacgaaaccaactccgaaaccaagcgtaaaaagctgaccaagcgtatcaaactgctggaagcgttcgttcagtctggtaacaaaccagagtggatgatcctgaccgttctgccggtactgccgccagatctgcgtccgctggttccgctggatggtggtcgtttcgcgacttctgacctgaacgatctgtatcgtcgcgtcattaaccgtaacaaccgtctgaaacgactgctggacctggctgcgccggatatcatcgtacgtaacgaaaaacgtatgctgcaggaagcggtagacgccctgctggataacggtcgtcgcggtcgtgcaatcaccggttctaacaagcgtcctctgaaatctttggccgacatgatcaaaggtaaacagggtcgtttccgtcagaacctgctcggtaagcgtgttgactactccggtcgttctgtaatcaccgtaggtccatacctgcgtctgcatcagtgcggtctgccgaagaaaatggcgctggagctgttcaaaccgttcatctacggcaagctggaactgcgtggtcttgctaccaccatcaaagctgcgaagaaaatggttgagcgcgaagaagctgtcgtttgggatatcctggacgaagttatccgcgaacacccggtactgctgaaccgtgcaccgactctgcaccgtctgggtatccaggcatttgaaccggtactgatcgaaggtaaagctatccagctgcacccgctggtttgtgcggcatataacgccgacttcgatggtgaccagatggccgttcacgtaccgctgacgctggaagcccagctcgaagcgcgtgcgctgatgatgtctaccaacaacatcctgtccccggcgaacggcgaaccaatcatcgttccgtctcaggacgttgtactgggtctgtactacatgacccgcgactgtgttaacgccaaaggcgaaggcatggtgctgactggcccgaaagaagcagaacgtctgtatcgctctggtctggcttctctgcatgcgcgcgttaaagtgcgtatcaccgagtatgaaaaagatgctaacggtgaattagtggcgaaaaccagcctgaaagacacgactgttggccgtgccattctgtggatgattgtaccgaaaggtctgccttacaccatcgtcaaccaggcgctgggtaaaaaagcaatctccaaaatgctgaacacctgctaccgcattctcggtctgaaaccgaccgttatttttgcggaccagatcatgtataccggctttgcatatgcagcgcgttctggtgcatctgttggtatcgatgacatggtcatcccggagaagaaacacgaaatcatctccgaggcagaagcagaagttgctgaaattcaggagcagttccagtctggtctggtaactgcgggcgaacgctacaacaaagttatcgatatctgggctgcggcgaacgatcgtgtatccaaagcgatgatggataacctgcaaactgaaaccgttattaaccgtgacggtcaggaagagaagcaggtttccttcaacagcatctacatgatggccgactccggtgcgcgtggttctgcggcacagattcgtcagcttgctggtatgcgtggtctgatggcgaagccggatggctccatcatcgaaacaccaatcaccgcgaacttccgtgaaggtctgaacgtactccagtacttcatctccacccacggtgctcgtaaaggtctggcggataccgcactgaaaactgcgaactccggttacctgactcgtcgtctggttgacgtggcgcaggacctggtggttaccgaagacgattgtggtacccatgaaggtatcatgatgactccggttatcgagggtggtgacgttaaagagccgctgcgcgatcgcgtattgggtcgtgtaactgctgaagacgttctgaagccgggtactgctgatatcctcgttccgcgcaacacgctgctgcacgaacagtggtgtgacctgctggaagagaactctgtcgacgcggttaaagtacgttctgttgtatcttgtgacaccgactttggtgtatgtgcgcactgctacggtcgtgacctggcgcgtggccacatcatcaacaaaggtgaagcaatcggtgttatcgcggcacagtccatcggtgaaccgggtacacagctgaccatgcgtacgttccacatcggtggtgcggcatctcgtgcggctgctgaatccagcatccaggtgaaaaacaaaggtagcatcaagctcagcaacgtgaagtcggttgtgaactccagcggtaaactggttatcacttcccgtaacaccgaactgaaactgatcgacgaattcggtcgtaccaaagaaagctacaaagtaccttacggtgcggtactggcgaaaggcgatggcgaacaggttgctggcggcgaaaccgttgcaaactgggacccgcacaccatgccggttatcaccgaagtaagcggttttgtacgctttactgacatgatcgacggccagaccattactcgtcagaccgacgaattgacaggtctgtcttcgctggtggttctggattctgcagaacgtaccgcaggtggtaaagatctgcgtccggcactgaaaatcgttgatgctcagggtaacgacgttctgatcccgggtaccgatatgcctgcgcagtacttcctgccgggtaaagcgattgttcagctggaagatggcgtacagatcagctctggtgacaccctggcgcgtattccgcaggaatccggcggtaccaaggacatcaccggtggtctgccgcgcgttgcggacctgttcgaagcacgtcgtccgaaagagccggcaatcctggctgaaatcagcggtatcgtttccttcggtaaagaaaccaaaggtaaacgtcgtctggttatcaccccggtagacggtagcgatccgtacgaagagatgattccgaaatggcgtcagctcaacgtgttcgaaggtgaacgtgtagaacgtggtgacgtaatttccgacggtccggaagcgccgcacgacattctgcgtctgcgtggtgttcatgctgtgactcgttacatcgttaacgaagtacaggacgtataccgtctgcagggcgttaagattaacgataaacacatcgaagttatcgttcgtcagatgctgcgtaaagctaccatcgttaacgcgggcagctccgacttcctggaaggtgaacaggttgaatactctcgcgtcaagatcgcaaaccgcgaactggaagcgaacggcaaagtgggtgcaacttactcccgcgatctgctgggtatcaccaaagcgtctctggcaaccgagtccttcatctccgcggcatcgttccaggagaccactcgcgtgctgaccgaagcagccgttgcgggcaaacgcgacgaactgcgcggcctgaaagagaacgttatcgtgggtcgtctgatcccggcaggtaccggttatgcgtaccaccaggatcgtatgcgtcgccgtgctgcgggtgaagctccggctgcaccgcaggtgactgcagaagacgcatctgccagcctggcagaactgctgaacgcaggtctgggcggttctgataacgagtaatcgttaatccgcaaataacgtaaaaacccgcttcggcgggtttttttatgggtgttattcagagggcaaagtcttcacgggaaatattaagaaaggcagggcgaaacgaggaagaagcttttcgccctggacaacattcctgttgacgggactaccataaaaaaacacaacgctttcaacaaccttgcgtttttcatcttccggagctgctcggaataaatttacgttcttacattctgtctcatggcctttgcgatgggcgtcccagatagctgtcccagtctttccataccggctgcaaaccctgagcggttaacgcggcagcaaccgcttccggtctgcgatcgtcgtgcggtgagaactgttccagctcggggtggttgtcggcatagccacctggctgcgttttcgaaaaagcgctgacgttattaattgccagcggaattacgcgatcgcgaaaccacggtgattcccgcgtggagagtgacagttcaatctccggtgcaagcagccggaaagcgcagatggcttgcactaactggcgttcatccataatcgacgcaggctcaatgctgccagtacatggacgcaggcgtgggaaggagacagagtagcggctttgccagtaatgctgttgcagccatagcaaatgttcggcaaccgtatagcagtcaactcgccagttgtcggaaaggccgattagcgcgccgaggcctatcttatcaatccccgcacgccctagccgatccggcgtttccagccgccagaagaagtcctgttttttacctttcagatgatggcgggcataagtcgcctcgtgatatgtctcctgataaaccatcacgccatccagacctagttgctttaactcggcgtattccgtctccgccagcggttgcacttccatctgtagtgaagagaactgttcacgcagggcagggagatgacgacgaaagtaatccatccccactttcgcctgatgttcaccagtgactaatagcagatgttcaaagcccatctcccgtatagcggcgctttccctggcaatatccgcttcatccagcgttttgcgcttgatgcgattgctcatggaaaatccgcagtacgtgcagtcgttagcgcaaagattggaaagataaagcgggacgtagaagctgacgacgttgccaaatcgctgacgggtcagacgctgcgcccgttgagccagtggttccaggtattcactggcggcaggtgatagcaatgccatcatatcgtcgcgggtgagttgcgaggcatttagcgcccgctctacgtcagcagccgttttgctgttgatacgcaggcgaatgtcgtcccagtccagttgtcgccagcgatcgctgaaggttttcatgccgatgcctccagaaattcggtcagcgggctggtggcatgagcaaaatgactgcggctgcccggtccggcctgacgtgccagcaggcctgcttctaccgccaggcgaaatgccttcgccatgttgacgggatcgtccgcgacggcaatcgccgtattcactaacaccgcattggcccccatttccagtgcctgcgcggcatggctgggaacaccgatgccagcatcgacaaccaccggaacagtggcctgttggataataatctccagcatggcgcgggtttccagtccctgattcgagccaatcggcgcgccgagcggcatcaccgctgcacagccgacttcttccagacgtttacacaataccggatcggccccgcagtaaggcagcacgacaaatccctgttgtaccagcgtttcggcggctttcagggtttcgatgggatcgggcaacagccagcgggcgtcagggtgaatctctaattttagccagtttgtgcctaacgcttcacgtgccagatgggcggcgaaaatggcttcttccgcggttttcgccccggaagtattcggcagcagggtcacacccgccgcgataagcggttcgaggatagcgtcgttgtgctggcgcaagtcgacacgtttcatcgccagcgtcaccagttggctgccggaagcgcgaatagactccaccatcagttgtgaagaggcgaattttccggtgccggtaaacagatgtgaatcaaacgttttgtccgcaatatgtaacatctcaaccccctgcaataacctgaaaaagcaggatctggtcgccatcctgcacgatatgttgcgcccattgttcccgcgggacgatttgctgattaatcgccagtgccgcacctgcttgttgttgatcgagttgctccagcagttcgtgaacagttagtccggcgacacactgcatcggttgatcgttaaacaggatctgcattgcttcctccgcataccgggcaaccactggcgcggcgcaaagccaggctgcgccactggctcgacttaccgtcgaacagtcggagttctcccgcaggcgtctctataccgcttaataacttaatggcttccagggcctgtaaagtgcccataaccccgaccaccgggccaaccacgcccgccgtgcggcagttgcgttctggctcctggttatctggccacaggcagcggtaacacccctgctcccagggcggcgtcagtaccatcaactgaccgccaaatccgaccgcgctggcggtgataagcggcgtgttgagtgccacgcaggtggcattaatctcctggcgagtcgccatattgtcagtacagtcgagcaccacatcggcttgtgcaaccgcatcttttaacgtctcacccgttaatcgttgttgtaatgccatcagttgaatgtcgggattcaactgtgtcagtcgctgttggctgacctgtgatttcgggagatcgatatcttcagtggtaaagaggatttgtcgttgcagattgcttaaatgcacatcgtcgtcatctgccagtaccagcgtcccgacgccagcccccgccaggtatagcgcagcaggtgtacccagaccgccaagaccaataatcagcacctggctgtcgagcagtttttgctgcccgtccagagcgatatcgtcgagcaggatttggcggctataacgcataaagtcacggtcattcatcgccaactcctgcaatttccagcagctgtgccgttgccaaacgccagtctgcggcttgagtaatggcgctgacgacggcgatactgccgacacccgttgctatcaccgcaggcgcgcgcgccagactgataccgccaatcgccacggtgggataatccgccaggcgctcaacatgccgtgccagctgttccagcccctggggtgcggaaggcatctgtttggtttgcgtcgggaacacatgtcccagcgcgatataagaagggcgtgctgccagcgcgacgtcgatttccatatcatcatgtgtcgaaacgcccagtcgcagacctgccgcgcggatggtgctgagatcggtggcttgcaaatcttcctgccccagatggacgccgtatgcctgatgcttgatcgccagtcgccagtaatcattaataaacaatcgcgcgttatagcggcggcccagcgcaattgccgccacgacatcggcttccacctcttcatcgcgctgatctttgatgcgtagctggagagtacgtacgcctgcatccaacagacgttcgatccactgtacgctgtcaaccaccgggtacagtcctaaacgaaagggtacaggaggaaactcaggctgatacatcacgcttcctccttacgcaggtagatttctccgcctctggcgcggaagttctccgacatatccgccattcccacttcaatggtttgcgcggcggcgtaatcacgcacttcctggctgattttcatcgagcagaatttcggtccacacatggagcaaaaatgggcgactttaccggactcttgcggcagggtttcatcgtgataagcgcgggcagtaaacgggtcgagggccagattaaactggtcttcccagcgaaattcgaagcgggctttcgacatggcgttatcgcgaatttgcgcgcccggatgccctttcgccaggtcggcggcgtgagcggcaatcttataggtgataagcccctgtttaacatcttctttatttggcaggcccagatgctctttcggcgttacgtagcagagcattgcacaaccaaaccagccaatcatcgccgcgccaatccctgacgtgaagtggtcatagcccggcgcgatatcggtagttagcggccccagagtgtaaaatggcgcttcgtggcagtgctctaactcctcggtcatattgcggcgaatcatctgcatcggcacgtggcctgggccttcaatcatcacctgtacgtcatattcccaggcgattttagtcagttcacccagcgtatgcagctcggcaaactgtgcttcatcgttggcgtcctgaatagaaccggggcgcaggccgtcgcccagcgatagcgaaacgtcataagcagcacagatttcacaaatttcgcggaagtgttgatagaggaaattttcctgatgatgggagaggcaccatttcgccataatcgaaccgccgcgagagacgataccggtcaggcgtttcgcggtcatcggcacgtagcgcagcagcacccccgcatggatcgtgaagtaatccacaccttgctcggcttgttccagcagggtgtcgcggaagacttcccaggtaagatcttcagcgatcccgttcaccttctccagtgcctggtagatcggcactgtaccgatcggcaccgggctgttacgcaaaatccactcgcgggtttcgtgaatatagcgaccagtggaaagatccatcacggtatccgctccccagcgtgtggaccataccagtttttccacttcttcttcgatggaagaagtgaccgctgagttgccgatattggcgttaacttttaccaggaagttacggccaataatcatcggctccgattccggatgattaatgttggccgggataatcgcacgtccggcagcaacttcatcacggacaaattccgcagtgatattttccggcagacgtgcgccaaagctcattcccggatgctggtggcgtaaaacttcgctccgtatgcgctcgcgacccatattctcgcgaatggcgatgaattccatttcgggtgtgatgataccctggcgggcgtagtgcagttgggtgacgcggcgtcctgctttggcgcgttttggcgttaatacgccgctaaaacgcagctcgtcgaggccatcatctgccagccgcgcttttgtgtaatcggaactgcgcacggtaagttcttcggtatcgccgcgcgcatcgatccacggctggcgtagttttgccagcccttgctgcacgttaatggcgatctgcggatcgccatacggaccggaggtgtcgtagaccggaatcgcttcgttttcttcgtactgcggttgttctttgctaccgccgattagcgtcgggctaagctggatctcacgcatcggcacgcgcacgccgggttgtgtggcagtgatgtaaatgcgttttgagttgggaaaggcggagccttccagggtatcgataaaatgttgggcctgggcgcgttgttcgcggcgggtcagttttgttgcagacatagctcgttccaaaaagttaaggacgtggcttgtcagacgacggatgaagcaagagacgatcgccgcaaaggcgatgcgatagcagattaactcttgttcccttcgcaggtattagcctgatcaggttccgcggatcccgaataaacggtctcagccagttaaggcactccgacaagaaattagccccacaaacggggcgttgaatgtaaattacgcgttaacagcgcagaactcaagcaggatgtttgacgcgggcggcgtcaagcaccagtagaatcagcttatcttccagcacaaagcgcgcttccagtgcctcgccgatgtcagataaaacctgttgaaactcaaggtaattatcatgatcgatggcggtttccagactggaatcgtagtcatccataatctgttgagtattggcttcgagttgtggccaaatcttcgcggcgcgtgcgagttgcccattgccttccagcttatgaagaatgcgctcataaatactgaaatgtccggcagacaagtaatcgaccaggctctgacaaaaatcatcaagggctttttcgtttagcctcatgtacgattctttgccaggcttaatgccaaccagattgtagtaagccacgagcagatgcttacgtacatgtagccagcgatcaaccagtttgttacttcctctgacgcgctccgtcaggttatcgagctggttaagcatgattgactccgcaagtttgtattcaaaaactgctctgtgagaaatgtaaaaaccatgttaaacatgccagtgatgcaaaggtagtgcaagagctatggatcgtataattgaaaaattagatcacggctggtgggtcgtcagccatgaacaaaaattatggttgccgaagggagaattgccatatggcgaagcggcaaatttcgatcttgtgggtcagcgcgcactacaaatcggcgaatggcagggggaacctgtttggttagtacaactgcagcggcgtcacgatatggggtcggtacgtcaggtcattgatctcgatgttgggctgtttcaactggccggacgtggcgtgcaactggcggagttttaccgatcgcataaatactgtggttactgcgggcatgaaatgtatccaagcaaaaccgaatgggcgatgctgtgcagccattgccgtgagcgttactacccgcaaatcgccccctgcattattgttgccatccgtcgcgatgattcgatcctcctcgcccagcatacccgccatcgtaacggtgtccatacagtacttgccggattcgtcgaagtgggtgaaaccctcgagcaggcagtcgcgcgggaagtgatggaagagagcggaattaaagttaaaaacttgcgttacgtgacctcccaaccgtggccgtttcctcagtctttaatgaccgcgtttatggcggaatatgacagcggcgagatcgtgatcgacccgaaagaattgcttgaggcgaactggtatcgctatgacgatttgccgttactcccgccgcccggcaccgtagcgcgccgtctgatagaagatacagtggcgatgtgtcgggcagagtatgagtgatgatacactgaccgcctgacgcactaaggaacagccaaaatgaccgaacttaaaaacgatcgttatctgcgggcgctgctgcgccagcccgttgatgtcactccagtatggatgatgcgccaggcgggtcgctatctaccggaatataaagccacgcgcgcccaggcgggcgattttatgtcgctgtgcaaaaatgccgagctggcgtgcgaagtgactttgcaaccgctgcgtcgctatccgctggatgcggcgatcctcttttccgatatcctcaccgtgccagacgcgatgggtttagggctctattttgaagccggagaaggtccgcgttttacctcgccagtcacctgcaaagccgatgtcgataaactgccaattccggacccggaagatgagctgggttacgtgatgaacgcggtgcgtaccattcgtcgcgaactgaaaggcgaagtgccgctgattggtttttccggcagcccgtggacgctggcgacctacatggtggaaggcggcagcagcaaagcgttcaccgtgatcaaaaaaatgatgtatgccgatccacaggcgctgcacgcgctactcgataaactggcgaaaagcgtcactttgtatctgaatgcgcagattaaagccggtgctcaggcagtcatgattttcgacacctggggcggcgtgcttaccgggcgcgattatcaacagttctcgctctattacatgcataaaattgttgatggtttactgcgtgaaaacgacggtcgccgcgtaccagtcacgctgtttactaaaggcggtggacagtggctggaagcgatggcagaaaccggttgcgatgcgctgggcctcgactggacaacggacatcgccgatgcgcgccgtcgcgtgggcaataaagtcgcgctgcagggtaatatggacccgtcgatgctgtacgcgccgcctgcccgcattgaagaagaagtggcgtctatacttgccggtttcggtcacggcgaaggccatgtctttaaccttggtcacggcattcatcaggatgtgccgccagaacatgcaggcgtgtttgtggaggcagtgcatcgcttgtctgaacagtatcaccgctaaggagcgattatggatctcgcgtcattacgcgctcaacaaattgaactggcttcttctgtgatccgcgaggatcgactcgataaagatccgccggatctgatcgccggagccgatgtcggatttgagcagggcggagaagtgacgcgagcggcgatggtgctgctgaaatacccctcgcttgagctggtggagtataaagtggcccgcatcgccaccaccatgccttacattccaggttttctctcgttccgcgaatatcctgcgctgctggcagcgtgggagatgctgtcgcaaaagccggatttagtgtttgtcgatggtcatgggatctcgcatcctcgccgtcttggcgtagccagccattttggcttattggtggatgtgccgaccattggcgtagcgaaaaaacggctctgcggtaaattcgaaccgctctccagcgaaccgggcgcgctggccccgctgatggataaaggcgagcagctggcctgggtctggcgcagcaaagcgcgctgtaacccgttgtttatcgctaccggccatcgggtcagcgtggacagcgcgctggcgtgggtacaacgctgcatgaaaggctatcgtctgccggagccaacgcgctgggcggacgcggtggcctcggaacgtccggcgttcgtgcgctatacagcaaatcagccctaattcaggtaaactgcggataatttccgtatttgagaactcaacatgttacaaaacccaattcatctgcgtctggagcgcctggaaagctggcagcatgtcacttttatggcctgcttatgcgaacgcatgtaccccaattacgccgtattctgtcagcaaaccggcttcggcgatgggcagatttaccgccgcattctcgatctcatttgggaaacgctgaccgtcaaagacgcaaaagtaaatttcgacagccaactggagaaatttgaagaagcgattccttcagccgacgatttcgatctgtacggcgtttatccggcaattgatgcttgcgtggcgttaagtgaactggtccattcgcgtttaagtggcgaaacgctcgaacacgcggtggaagtgagtaagacctccatcacgaccgtggcgatgctggaaatgactcaggctggtcgcgaaatgagcgatgaagagctcaaagaaaacccagctgtagagcaagaatgggacattcagtgggaaatattccgacttttagctgagtgcgaagaacgcgatatcgagctgataaaaggccttagggcagacctgcgtgaggcgggtgagagcaatattggtataatttttcagcaataagaccagaaaacgtgatttaacgcctgatttgtcgtacctggagtcttccctttcgccccccgtctggtctacatttggggggcgaaaaaaagtggctatcggtgcgtgtatgcaggagagtgctattctggcatttccgtcgcactcgatgcttagcaagcgataaacacattgtaaggataacttatgaacaagactcaactgattgatgtaattgcagagaaagcagaactgtccaaaacccaggctaaagctgctctggagtccactctggctgcaattactgagtctctgaaagaaggcgatgctgtacaactggttggtttcggtaccttcaaagtgaaccaccgcgctgagcgtactggccgcaacccgcagaccggtaaagaaatcaaaattgccgcagctaacgtaccggcatttgtttctggcaaggcactgaaagacgcagttaagtaagattgcgtggcagtgaacagttttatcgaaggggtggtttcaccccttttgtctttctggcgtcgatcattgatgctggctggcgctctgtttctcactgcttgtagtcacaactcttcacttcctccctttaccgccagtggatttgctgaagaccagggcgcggtacgcatctggcgaaaagacagcggcgataatgtgcatctgcttgccgtgtttagcccgtggcgcagtggcgataccacgacgcgagagtatcgctggcagggcgataacctcacgctcatcaatatcaatgtttacagcaaacccccggtgaatattcgcgcgcgttttgacgatcgcggcgatctgagctttatgcaacgcgaatccgatggggaaaagcagcagctttctaacgaccaaatcgatttataccgttatcgtgctgatcagatccgccagattagcgatgccttacgtcaggggagagtcgtgctgcgccaggggcgctggcatgcgatggagcagactgtgaccacctgtgaagggcaaaccattaaacctgatttagattcgcaggcgatagcgcatatcgagcgccgccagagccgctcttctgttgatgtcagcgtggcatggctggaagcgcccgaaggttcgcaattactgttggtggcaaactctgatttctgtcgctggcaacccaacgagaaaacgttctgatttaccagtggcccatacccatatgaccgccaccaccgcagccgccgtaacccattccggtaccgcgcggaatacccgcttcagccatcgcaatatctcgtttcacccgtaactcatctaacgactgacgcaaattctccatctctttggcgaccgcgttaattttgctgctatccggtgggttcgcggctaacagggcattgtattcataacgctttgtcaccagttgctgttgcagtgcgctgctttgagcgtaaaagtcattatggattttctgccacgctgtctgttgttcgctggtcaaaggcgcggcattttgctgccacataccatgtccgccgtgagcaaatgcagatgtcgatcccatcgccattgctgaaagcgccatcattaccagggcaattttcgtgttccgtttcatggttaatcctccagtggttgtcttacttcgggtattgcatcttccgtgccaacggcgaaacgctgatatgacgggtaatctggcatgataaacgagtaaaaatgactcgcctgctgcgggtagcgagtcatttttactcattgaaacttaagcctttgtgttacagctcagggtaagcgctgataaaagatggcatgatttctgctgtcagaaagggatggacaggcaaagaagaagatgcgttttatgcaacgttctaaagactccttagctaaatggttaagcgcgatcctccccgtggtcattgttgggctggtggggctgtttgcggtgacagtgattcgcgattatgggcgcgagactgccgccgccagacaaacgctgctggaaaaaggcagtgtacttatccgtgctctcgaatccggctcgcgcgtcggcatggggatgcgcatgcatcatgcgcagcagcaggcattactggaagaaatggccgggcagcctggtgtacgttggtttgcggtcacggatgaacaaggaacaatcgtgatgcatagcaactccggcatgatgggaaaacagctttattccccgcaggaaatgcagcagttacatccgggagatgaagaagcgtggcggcggatcgatagcgcagacggcgagcctgttctggaaatttatcgccagtttcaaccgatgtttgctgctggaatgcaccggatgcgccatatgcagcagtatgccgcgacaccacaagcaatttttatcgctttcgacgccagtaacattgtgagtgctgaagatcgtgagcagagaaacaccctgattatcctcttcgccctggcgacggtcttgctggcaagcgtgttgtcattcttctggtatcgccgatatctgcgctcgggccagctgttgcaggatgaaatgaagcgcaaagagaagctggtggcactggggcatcttgcggcaggcgttgcccacgaaatccgtaacccactttcctcgattaaagggctggcgaaatactttgccgaacgcgcgccagcagggggagaagcgcatcaactggcgcaggtgatggcgaaagaagctgaccgtttaaaccgcgtggtaagcgagttgctggaactggttaagccaacgcatctggctttgcaggcggtggaactcaacacgctgattagccactcattacagctggtaagccaggatgcaaacagccgggagatccagttacgctttaccgccaacgacacattaccggaaattcaggccgatccggacaggctgactcaggtcctgttgaatctctatctcaatgctattcaggcgattggtcagcatggcgtgattagcgtgacggccagcgaaagcggcgcaggcgtgaaaatcagcgttaccgacagcggtaagggaattgcggcggatcagcttgaagccatcttcaccccgtacttcaccaccaaagccgaaggcaccggactggggctggcggtcgtgcataatattgttgaacaacacggtggtacaattcaggtcgcaagccaggagggaaaaggcgcaacgttcaccctttggcttccggtcaatattacgcgtaaggacccacaaggatgacgcacgataatatcgatattctggtggtggatgatgacattagccactgcactattttgcaggctttgctgcgcggctggggttataacgtcgcgctggcgaacagcgggcgacaggcgctggagcaggtgcgggaacaggtttttgatcttgtgctttgcgatgtacgaatggcagagatggatggtatcgccacgctaaaagagatcaaaacattaaaccccgcgattccggtgctgattatgaccgcgtactccagcgtcgagacggcggtagaggcgttgaaaaccggggcgctggattatctcatcaagccgctggatttcgataacctgcaggcgacgctggaaaaggcgctcgcgcatacacacagtgttgacgctgaaacgcctgcggtgtctgccagccagttcggtatggtcggtaaaagcccggcgatgcaacacctgctcagtgaaatcgccctcgtcgcgccatcggaagccacggtgctgatccacggcgattccggcaccggtaaagagctggtcgccagggcgattcacgccagtagcgcacgtagcgaaaaaccgctggtaacgctcaactgcgcggcgctcaacgaatccttgctggagtctgaattgttcggtcacgaaaaaggggcgtttaccggggccgacaaacgccgggaagggcgctttgttgaggcggacggcggcacgctgtttctcgatgaaattggcgatatctcgccgatgatgcaggttcgtctgctgcgtgcgattcaggagcgcgaagttcagcgtgtcggcagcaaccagaccatctcggttgatgtccggctgattgcggcgactcatcgcgatcttgccgcagaggtgaatgccgggcgttttcgccaggatctctactatcgcctgaacgtggtggcgattgaagtaccatcgctgcgtcagcggcgggaagatattcctctgctggcaaaccattttcttcagcgctttgccgaacgtaatcgcaaggcggtaaaaggctttacgccccaggcgatggatctgctgattcattacgactggccgggaaatattcgtgaactggaaaacgcggtggaacgggcggtggtgctgctgaccggggaatatatttccgaacgcgagctgccgctggcgattgccagtacgccgatcccgctggtacaaagtcaggatattcagccgctggtggaagtcgaaaaagaggtgattctggcggcgctggagaaaacgggcggcaacaaaaccgaagccgcccgccagttagggatcacgcgcaaaacgctattggcaaaactgtcgcgttagttctgctcgcgttcgatagcgcgccagccgatatctttccggcagaagcagtcgtcccaatggatatcggtcattaaggcataagcgcgtttctgcgcttctgccacggtatgacccagcgcggtaacgcacagtacgcgcccgccgctggtcactacctgctcgtcatccgctagtttcgtgcccgcgtggaacactttgccgtctgccacttcttccagcggcaggccgtggatcacatcgccggtgcggtaatcgcccggatatccacccgcagccatcaccacgccgagagaagcgcgttcatcccactcggacgttttctcgtccagcttgccttcacaggccgccaggcagagctcaaccagatcggacttcatgcgcagcataatcggctgggtttccggatcgccaaagcggcagttaaattcaataaccttcggattgccctgtttgtcgatcatcaggcccgcgtagagaaaaccagtgtaggtgttgccttccgccgccatgcctttcacggttggccagatgatacgttccatcgtgcgctgatgaacctcatcggtcactactggcgcaggggagtaagcgcccatcccgccggtgttcggcccggtatctttatcgcctacgcgtttgtgatcctggctggtggccatcggcagcacatgctcgccgtccaccatcacgataaagctcgcttcttcgccgtcgaggaactcttcgataacaatgcgatgacccgcgtcgccaaacgcgttgcccgccagcatgtcgcgcacggcggcttcagcttcttccagcgtcatcgccacgataacgcctttcccggcggccagaccgtccgctttaatgacgattggcgcgcctttctcacgcagatacgccagcgcaggttctacctcggtgaagttctggtattccgctgtgggaatgttatggcgggccagaaagtctttggtgaatgctttagaaccttccagttgtgcagcacctgcggttgggccgaagattttcagcccggcggcgcggaaggtatcgactacgcctttcaccagcggcgcttccgggccaacgatggttagatctaccttttcgttttgtgcgaaatccagcagcgccgggatatcggttacgccgatagcgacgttctgtagcgcgggttccagcgcagtgcctgcattacccggagcaacaaaaacagtttcaaccagcggcgactgagccgctttccaggccagcgcgtgctcgcgcccgccgttaccaatcactaatactttcatctattgctccattaatggcggaagtggcgcatgtcggtgaagagcatcgcaataccgtgctcgtcggcggcggcaatcacttcgtcatcacggatagaaccgccaggctggattacacaggtcacacccgcagcggcggcggcatcaataccgtcgcggaacgggaagaacgcgtcagaagccattgacgaacctttcacttccagaccttcatcggcagctttaataccggcgatttttgcggagtacacgcggctcatctggcccgcgccaatgccgatggtcatattgtttttggcatagacaatggcgttggatttcacgaatttcgccaccttccagcagaacagcgcatcacgcagctcctgttcgctcggctggcgtttggtgacgacgcgcagttcttccgcaccgaccatgcccaggtcgcgatcctgaaccaggaggccgccgttcacgcgtttgaaatcaaggcccggaacacgctcgccccactgaccgcaggtcagaacgcgtacgttctgtttggcggcggtgattttcagagcttcttcgctggcggacggcgcaataatcacttcgacaaactgacgagaaatgatggcctgtgcggtttccgcatccagctcgcggttaaaggcgataatgccgccgaacgcggaggttgggtcggttttgtacgcgcgatcgtaagcatcaagaatggaatggccgatagcaacgccgcaagggttggcgtgcttcacaatcacacatgccggctcggcgaactctttcacgcactccagcgccgcatcggtatcggcgatgttgttataagagagggctttaccctgaacctgggttgcggtagcaacggaggcttctttcacattctcttctatatagaaggcagcctgctggtggctgttctcgccgtaacgcatatcctgcttcttaatgaagttcaggttcagcgtgcgtgggaagcgaccggcggcttctttgctttcaccgtggtaagccggaaccatgctgccgaagtagttggcaatcatgctgtcgtaggcggcggtatgttcaaaggctttgatggcaaggtcgaaacgggttgcaagcgtcagcgatccttcgttggcatccatctctttaataatggcgtcgtagtcgctgctcttcaccacgattgcgacatctttatggttcttggcggcggagcgcaccatcgttgggccgccgatatcgatgttctctaccgcatcttccagcgagcagccttcacgagcaacggtctgggcgaacggatacaggttaacaaccaccatatcgataggcaggatctgatgttcttccataatggcatcgtccaggccgcgacggcccagaatgccaccatgtactttcggatgcagggtcttcacgcgtccatccatcatctccgggaaaccggtgtaatcggaaacttcggttaccggcagacctttttctgctaacagacgggctgtgccccctgtagacagcagctccacaccgcgtgcggaaagtgcctgggcgaattcgacgataccggctttgtcagaaacactgagcagagcgcggcggactggacgacgttgttgcatggtaaatcccctggatttgactattacagagagcgttagctgaatttttcgcgaaaaactcagctaacgcccctaacggggcatccttatttttcgcccgcattgtaacgaaaacgtttgcgcaacgctcgcgaatttttctctttcaatggtgatcacaattttgacagtggctaccgtgggaaaaatacagaaattacattgatgattgtggataactctgtgcgtaaaaaggtataaagcggggttttgctggggaatgcagcagtcagtcatttttatgcaatttttctattgcggcctgcggagaactccctataatgcgcctccatcgacacggcggatgtgaatcacttcacacaaacagccggttcggttgaagagaaaaatcctgaaattcagggttgactctgaaagaggaaagcgtaatatacgccacctcgcgacagtgagctgaaagccgcgtcgcaactgctctttaacaatttatcagacaatctgtgtgggcactcgaagatacggattcttgacgtcgcaagacgaaaaatgaataccaagtctcaggagtgaacacgtaattcattacgaagtttaattctttgagcatcaaacttttaaattgaagagtttgatcatggctcagattgaacgctggcggcaggcctaacacatgcaagtcgaacggtaacaggaatcagcttgctgatttgctgacgagtggcggacgggtgagtaatgtctgggaaactgcctgatggagggggataactactggaaacggtagctaataccgcataacgtcgcaagaccaaagagggggaccttcgggcctcttgccatcggatgtgcccagatgggattagctagtaggtggggtaaaggctcacctaggcgacgatccctagctggtctgagaggatgaccagccacactggaactgagacacggtccagactcctacgggaggcagcagtggggaatattgcacaatgggcgcaagcctgatgcagccatgccgcgtgtatgaagaaggccttcgggttgtaaagtactttcagcggggaggaagggagtaaagttaatacctttgctcattgacgttacccgcagaagaagcaccggctaactccgtgccagcagccgcggtaatacggagggtgcaagcgttaatcggaattactgggcgtaaagcgcacgcaggcggtttgttaagtcagatgtgaaatccccgggctcaacctgggagctgcatctgatactggcaagcttgagtctcgtagaggggggtagaattccaggtgtagcggtgaaatgcgtagagatctggaggaataccggtggcgaaggcggccccctggacgaagactgacgctcaggtgcgaaagcgtggggagcaaacaggattagataccctggtagtccacgccgtaaacgatgtcgacttggaggttgtgcccttgaggcgtggcttccggagctaacgcgttaagtcgaccgcctggggagtacggccgcaaggttaaaactcaaatgaattgacgggggcccgcacaagcggtggagcatgtggtttaattcgatgcaacgcgaagaaccttacctggtcttgacatccacggaagttttcagagatgagaatgtgccttcgggaaccgtgagacaggtgctgcatggctgtcgtcagctcgtgttgtgaaatgttgggttaagtcccgcaacgagcgcaacccttatcctttgttgccagcggtccggccgggaactcaaaggagactgccagtgataaactggaggaaggtggggattcacgccgcatccggcaatcagcgcctgatgtgacgcttacgcgtcttatccggcaattctctgctcccgacgagggcaacaaatgccgcgtggcctggaattactgattgcacaaaccattttgcaaggtttcgacgctcagtatggtcgattcctcgaagtgacttccggggcgcagcagcgtttcgagcaagccgactggcatgctgtccagcaggcgatgaaaaaccgtattcatctttacgatcatcacgtgggtctggtcgtggagcaactgcgctgcattactaatggccaaagcacggacgcggcatttttactgcgcgttaaagagcattacacccggctgttgccagattacccgcgcttcgagattgcggagagctttttcaactccgtgtactgtcggttatttgaccaccgctcgcttactcccgagcggctttttatctttagctcccagccagagcgccgctttcgtaccattccacgcccactggcgaaagactttcaccccgatcacggctgggaatctctgctgatgcgcgttatcagcgatctgccgctgcgtctgcgttggcagaataaaagccgtgacattcattacatcgttcgccatctgacggaaacgctggggacagacaacctcgcggaaagtcatttacaggtggcgaacgaactgttttaccgcaataaggcagcctggctggtgggcaaactgatcacgccttccggcacgttgccatttttattgccgatccaccagacggacgacggcgagttatttattgatacctgcctgacgacgaccgccgaagcgagcattgtttttggctttgcgcgttcttattttatggtttatgcaccgctgcccgcagcgctggtcgagtggctacgggaaattctgccaggtaaaaccaccgctgaattgtatatggctatcggctgccagaagcacgccaaaaccgaaagctaccgcgaatatctcgtttatctacagggctgtaatgagcagttcattgaagcgccgggtattcgtggaatggtgatgttggtgtttacgttgccgggttttgatcgagtattcaaagtcatcaaagacaggttcgcgccgcagaaagagatgtctgccgctcacgttcgtgcctgctaccaactggtgaaagagcatgatcgcgtgggccgaatggcggacacccaggagtttgaaaactttgtgctggagaagcggcatatttccccggcattaatggaattactgctccaggaagcagcggaaaaaatcaccgatctcggcgaacaaattgtgattcgccatctctatatcgaacgacggatggtgccgcttaatatctggcttgagcaagttgaggggcagcaattgcgtgatgccattgaagagtacggcaacgccattcgccagcttgccgctgccaacatcttccctggggatatgttatttaaaaactttggcgtcacccgtcacgggcgcgtggtgttttatgattacgacgaaatttgctacatgacggaagtgaatttccgcgacatcccgctgccgcgctacccggaagacgaacttgccagcgaaccgtggtacagcgtctcgccgggcgatgttttcccggaagagttccgtcactggttatgtgccgacccgcgtattggtccgctatttgaagagatgcacgccgacttgttccgcgctgattactggcgcgcactacaaaaccgcatacgtgaagggcatgtggaagatgtttatgcgtgacgtcaagtcatcatggcccttacgaccagggctacacacgtgctacaatggcgcatacaaagagaagcgacctcgcgagagcaagcggacctcataaagtgcgtcgtagtccggattggagtctgcaactcgactccatgaagtcggaatcgctagtaatcgtggatcagaatgccacggtgaatacgttcccgggccttgtacacaccgcccgtcacaccatgggagtgggttgcaaaagaagtaggtagcttaaccttcgggagggcgcttaccactttgtgattcatgactggggtgaagtcgtaacaaggtaaccgtaggggaacctgcggttggatcacctccttaccttaaagaagcgtactttgcagtgctcacacagattgtctgatagaaagtgaaaagcaaggcgtcttgcgaagcagactgayacgtccccttcgtctagaggcccaggacaccgccctttcacggcggtaacaggggttcgaatcccctaggggacgccacttgctggtttgtgagtgaaagtcacctgccttaataatctcaaaactcatcttcgggtgatgtttgagatatttgctctttaaaaatctggatcaagctgaaaattgaaacactgaacaacgagagttgttcgtgagtctctcaaattttcgcaacacgatgatgaatcgcaagaaacatcttcgggttgtgaggttaagcgactaagcgtacacggtggatgccctggcagtcagaggcgatgaaggacgtgctaatctgcgataagcgtcggtgaggtgatatgaaccgttataaccggcgatttccgaatggggaaacccagtgtgtttcgacacactatcattaactgaatccataggttaatgaggcgaaccgggggaactgaaacatctaagtaccccgaggaaaagaaatcaaccgagattcccccagtagcggcgagcgaacggggaggagcccagagcctgaatcagtgtgtgtgttagtggaagcgtctggaaaggcgtgcgatacagggtgacagccccgtacacaaaaatgcacatattgtgagctcgatgagtagggcgggacacgtggtatcctgtctgaatatggggggaccatcctccaaggctaaatactcctgactgaccgatagtgaaccagtaccgtgagggaaaggcgaaaagaaccccggcgaggggagtgaaaaagaacctgaaaccgtgtacgtacaagcagtgggagcctcttaatggggtgactgcgtaccttttgtataatgggtcagcgacttatattctgtagcaaggttaaccgaataggggagccgaagggaaaccgagtcttaactgggcgttaagttgcagggtatagacccgaaacccggtgatctagccatgggcaggttgaaggttgggtaacactaactggaggaccgaaccgactaatgttgaaaaattagcggatgacttgtggctgggggtgaaaggccaatcaaaccgggagatagctggttctccccgaaagctatttaggtagcgcctcgtgaattcatctccgggggtagagcactgtttcggcaagggggtcatcccgacttaccaacccgatgcaaactgcgaataccggagaatgttatcacgggagacacacggcgggtgctaacgtccgtcgtgaagagggaaacaacccagaccgccagctaaggtcccaaagtcatggttaagtgggaaacgatgtgggaaggcccagacagccaggatgttggcttagaagcagccatcatttaaagaaagcgtaatagctcactggtcgagtcggcctgcgcggaagatgtaacggggctaaaccatgcaccgaagctgcggcagcgacacttatgtgttgttgggtaggggagcgttctgtaagcctgcgaaggtgtgctgtgagggttgctggaggtatcagaagtgcgaatgctgacataagtaacgataaagcgggtgaaaagcccgctcgccggaagaccaagggttcctgtccaacgttaatcggggcagggtgagtcgacccctaaggcgaggccgaaaggcgtagtcgatgggaaacaggttaatattcctgtacttggtgttactgcgaaggggggacggagaaggctatgttggccgggcgacggttgtcccggtttaagcgtgtaggctggttttccaggcaaatccggaaaaccaaggctgaggcgtgatgacgaggcactacggtgctgaagcgacaaatgccctgcttccaggaaaagcctctaagcatcaggtaacatcaaatcgtaccccaaaccgacacaggtggtcaggtagagaataccaaggcgcttgagagaactcgggtgaaggaactaggcaaaatggtgccagtaacttcgggagaaggcacagctgatatgtaggtgaagcgacttgctcgtggagctgaaatcagtcgaagataccagctggctgcaactgtttattaaaaacacagcactgtgcaaacacgaaagtggacgtatacggtgtgacgcctgcccggtgccggaaggttaattgatggggttagcggtaacgcgaagctcttgatcgaagccccggtaaacggcggccgtaactataacggtcctaaggtagcgaaattccttgtcgggtaagttccgacctgcacgaatggcgtaatgatggccaggctgtctccacccgagactcagtgaaattgaactcgctgtgaagatgcagtgtacccgcggcaagacggaaagaccccgtgaacctttactatagcttgacactgaacattgagccttgatgtgtaggatagagctgggtttagaacgtcgtgagacagttcggtccctatctgccgtgggcgctggagaactgaggggggctgctcctagtacgagaggaccggagtggacgcatcactggtgttcgggttgtcatgccaatggcactgcccggtagctaaatgcggaagagataagtgctgaaagcatctaagcacgaaacttgccccgagatgagttctccctgactccttgagggtcctgaaggaacgttgaagacgacgacgttgataggccgggtgtgtaagcgcagcgatgcgttgagctaaccggtactaatgaaccgtgaggcttaaccttacaacgccgaagatgttttggcggatgagagaagattttcagcctgatacagattagattaaccggcgacaagcgggttaatgaaacagaatttgcctggcggccttagcgcggtggtcccacctgaccccatgccgaactcagaagtgaaacgccgtagcgccgatggtagtgtggggtctccccatgcgagagtagggaactgccaggcatcaaattagaaaaaccccggtcaataaggccggggttttttgcatatcaattatttgcatgatgaagggaatctcatgtcagttctgtatatccaaattcgtcgtaatcaaattactgttcgcgatcttgaaagcaaacgtgaagtgtcaggagatgctgccttcagtaaccagcgcctgttaatcgccaatttctttgttgcagaaaaagttctgcaagatcttgttctgcaactccacccacgttcaacctggcattcttttttgccagcaaaacgtatggatattgttgtgagcgcgctggaaatgaatgagggcggtttgtcacaggttgaggaacgcattcttcatgaagtggtcgcaggggcaacgttaatgaaatatcgccagttccacatccatgcgcaatcagtggtactcagtgatagtgcggtcctggcaatgtttaagcagaaataatcatgtcaccattggtgggtacgaaacctaaagttcagcccaccgggatgagaaaaaaaccgcctacacccccacatatgccagattcagcaacggatacggtttccccaaatcgtccacctcagagcgttccgtaaccttaaagcccaccttcttatagaacccaaccgcctgctcattttgctcattaacattggttgtcagttccggggccattgagagcgcatgcttcaccagcatccggcccacgccgcagccgcgcacatcaggatcgataaacagcgcatccatatgctgcccacttaacaacataaacccaaccggctgatcccgctcattaaccgcgacccacaacggtgcttccggcagaaaggaatgcaccagctcttccagctcggcccgatactctgctgataaaaaatcgtgagtggcatcgacagaacgacaccaaatcgcaacgagttcctccccctcctcatgccgtgagcggcgaatactaataaccattttctctccttttcgtcattcttatattctaacgtagccttttccttgaaactttctcaccttcaacatgcaggctcgacattggtaaattttctggttatcttcagctatctggatgtctaaacgtataagcgtatatagtgaggtaatcaggttatgccgattcgtgtgccggacgagctacccgccgtcaatttcttgcgtgaagaaaacgtctttgtgatgacaacttctcgcgcgtctggtcaggaaattcgtccgctaaaggtgcttatccttaacctgatgccgaagaagatcgaaactgaaaatcagtttctgcgcctgctttcaaactcacctttgcaggtcgatattcagcttttgcgcatcgattcccgtgaatcgcgcaacacgcccgcagagcatctgaataacttctactgtaactttgaagatattcaggaacaaaactttgacggtctgatagttaccggcgcgccactgggcctggtggagtttaatgatgtcgcttactggccgcagatcaaacaggtgctggagtggtcgaaagatcacgtcacctcgacgctgtttgtctgctgggctgtacaggccgcgctcaatatcctctatggtattcctaagcaaacccgcaccgacaaactctctggcgtttacgagcatcatattctccatcctcatgcgcttctgacgcgtggctttgatgattcattcctggcaccgcattcgcgctatgctgactttccggcagcgttgattcgtgattataccgatctggaaattctggcagagacggaagaaggggatgcatatctgtttgccagcaaagataagcgcattgcctttgtgacgggccatcccgaatatgatgcgcaaacgctggcgcaggaatatttccgcgatgtggaagccgggctagacccggatgtaccgtataactatttcccgcacaatgatccgcaaaatacaccgcgagcgagctggcgtagtcacggtaatttgctgtttaccaactggctcaactattacgtctaccagatcacgccatatgatctacggcacatgaatccaacgctggattaatcttctgtgatagtcgatcgttaagcgattcagcaccttacctcaggcaccttcgggtgccttttttatttccgaaacacacctcagtaagtgaataaattttatttatattgttatcaataagttaacatgtatttttaattaaaatggaaattgtttttgattttgcattttaaatgagtagtcttagttgtgctgaacgaaaagcgcacaacgatccttcgttcacagtggggaagttttcggatccatgacgaggagctgcacgatgactgaacaggcaacaacaatcgatgaactggcttttacaaggccgtatggcgagcaggagaagcaaattcttactgccgaagcggtagaatttctgactgagctggtgacgcattttacgccacaacgcaataaacttctggcagcgcgtattcagcagcagcaggatatcgataacggaatgttgcctgattttatttcggaaacagcttccattcgttatgctgactggaaaattcgcgggattccttcggacttagaagatcgtcgcgtagagattaccggacctgtagagcgcaagatggtgatcaacgcgctcaacgccaatgtgaaagtctttatggccgatttcgaagattcactggcaccagactggaacaaagtgatcgatgggcaaattaacctgcgcgatgcggttaacggcaccatcagctatagcaatgaagcaggcaaaatttatcagctcaagcccaatccagcggttttgatttgtcgggtacgcggtctgcacttgccggaaaaacatgtcacctggcgtggtgagacaatccccggtagcctgtttgattttgcgctctatttcttccacaactatcaggcactgttggcaaagggcagcggtccctatttctatctgccgaaaacccagtcctggcaggaagcggcctggtggagcgaagtcttcagctatgcagaagatcgctttaatctgccgcgcggcaccatcaaggcgacgttgctgattgaaacgctgcccgccgtgttccagatggatgaaatccttcacgcgctgcgtgaccatattgttggtctgaactgcggtcgttgggattacatcttcagttatatcaaaacattgaaaaactatcccgatcgcgtcctgccagacagacaggcagtgacgatggataaacccttcctgaatgcttactcacgcctgttgattaaaacctgccataaacgcggtgcttttgcgatgggcggcatggcggcgtttattccgagcaaagatgaagagcgcaataaccaggtgctcgacaaagtaaaagcggataaatcgctggaagccaataacggtcacgatggcacatggatcgctcacccgggccttgctgatacggcaatggcggtattcaacgatattctcggctcccgcaaaaaccagcttgaggtgatgcgcgaacaagacgcgccgattactgccgatcagctgctggcaccttgtgctggtgaacgcaccgaagaaggtatgcgcgccaacattcgcgtggctgtgcagtacatcgaagcgtggatctctggcaatggctgtgtgccgatttatggcctgatggaagatgcggcgacggctgaaatttcccgtacctcaatctggcagtggatccatcatcaaaaaacgttgagcaatggcaaaccggtgactaaagccttgttccgccagatgctgggcgaagagatgaaagtcattgccagcgaactgggcgaagaacgtttctcccatgggcgttttgacgatgccgcacgcttgatggaacagatcaccacttccgatgagttaattgatttcctgaccctgccaggctaccgcctgttagcgtaaaccaccacataactatggagcatctgcacatgaaaacccgtacacaacaaattgaagaattacagaaagagtggactcaaccgcgttgggaaggcattactcgcccgtacagcgcggaagatgtggtgaaattacgcggttcagtcaatccggaatgcaccctggcgcaactgggtgcggcgaaaatgtggcgtctgctgcacggcgagtcgaaaaaaggctacatcaacagcctcggtgcactgactggcggtcaggcgctgcaacaggcgaaagcgggtattgaagcagtctatctgtcgggatggcaggtagcggcggacgctaacctggcggccagcatgtatccggatcagtcgctctatccggcaaactcggtgccagcggtggtggagcggatcaacaatactttccgccgtgcggatcagatccaatggtccgcgggcattgagccgggcgatccgcgctatgtcgattacttcctgccgatcgtcgccgatgcggaggccggttttggcggtgtactgaatgcctttgaactgatgaaagcgatgattgaagccggtgcagcggcagttcacttcgaagatcagctggcatcagtgaagaaatgtggtcacatgggcggcaaagttttggtgccaactcaggaagctattcagaaactggtcgcggcgcgtctggcagctgatgtgacgggcgttccaaccctgctggttgctcgtaccgatgccgatgcggcggatctgattacctccgattgcgacccatatgacagcgaatttattactggcgagcgtaccagtgaaggcttcttccgtactcatgcgggtattgagcaagcgatcagccgtggcctggcgtatgcgccatatgctgacctggtatggtgtgaaacctccacgccggacctagaactggcgcgtcgctttgcacaagccatccacgcgaaatatccgggcaaactgctggcttataactgctcgccgtcgttcaactggcagaaaaacctcgacgacaaaactattgccagcttccagcagcagctgtcggatatgggctacaagttccagttcatcaccctggcaggtatccacagcatgtggttcaacatgtttgacctggcaaacgcctatgcccagggcgagggtatgaagcactatgttgagaaagtgcagcagccggaatttgccgccgcgaaagatggctataccttcgtatctcaccaacaggaagtgggtacaggttacttcgataaagtgacgaccattattcaaggtggcacgtcttcagttaccgcgctgaccggctccaccgaagaatcgcagttctaagcaaccgataaacgttgctgactgtaggccggataaggcgttcacgccgcatccggcaatcagcgcctgatgcgacgcttgcgcgtcttatcatgcctacagccgttgccgaacgtaggccggataaggcgttcacgccgcatccggcaatcagcgcctgatgtgacgcttacgcgtcttatccggcaattctctgctcccgacgagggcaacaaatgccgcgtggcctggaattactgattgcacaaaccattttgcaaggtttcgacgctcagtatggtcgattcctcgaagtgacttccggggcgcagcagcgtttcgagcaagccgactggcatgctgtccagcaggcgatgaaaaaccgtattcatctttacgatcatcacgtgggtctggtcgtggagcaactgcgctgcattactaatggccaaagcacggacgcggcatttttactgcgcgttaaagagcattacacccggctgttgccagattacccgcgcttcgagattgcggagagctttttcaactccgtgtactgtcggttatttgaccaccgctcgcttactcccgagcggctttttatctttagctcccagccagagcgccgctttcgtaccattccacgcccactggcgaaagactttcaccccgatcacggctgggaatctctgctgatgcgcgttatcagcgatctgccgctgcgtctgcgttggcagaataaaagccgtgacattcattacatcgttcgccatctgacggaaacgctggggacagacaacctcgcggaaagtcatttacaggtggcgaacgaactgttttaccgcaataaggcagcctggctggtgggcaaactgatcacgccttccggcacgttgccatttttattgccgatccaccagacggacgacggcgagttatttattgatacctgcctgacgacgaccgccgaagcgagcattgtttttggctttgcgcgttcttattttatggtttatgcaccgctgcccgcagcgctggtcgagtggctacgggaaattctgccaggtaaaaccaccgctgaattgtatatggctatcggctgccagaagcacgccaaaaccgaaagctaccgcgaatatctcgtttatctacagggctgtaatgagcagttcattgaagcgccgggtattcgtggaatggtgatgttggtgtttacgttgccgggttttgatcgagtattcaaagtcatcaaagacaggttcgcgccgcagaaagagatgtctgccgctcacgttcgtgcctgctaccaactggtgaaagagcatgatcgcgtgggccgaatggcggacacccaggagtttgaaaactttgtgctggagaagcggcatatttccccggcattaatggaattactgctccaggaagcagcggaaaaaatcaccgatctcggcgaacaaattgtgattcgccatctctatatcgaacgacggatggtgccgcttaatatctggcttgagcaagttgaggggcagcaattgcgtgatgccattgaagagtacggcaacgccattcgccagcttgccgctgccaacatcttccctggggatatgttatttaaaaactttggcgtcacccgtcacgggcgcgtggtgttttatgattacgacgaaatttgctacatgacggaagtgaatttccgcgacatcccgctgccgcgctacccggaagacgaacttgccagcgaaccgtggtacagcgtctcgccgggcgatgttttcccggaagagttccgtcactggttatgtgccgacccgcgtattggtccgctatttgaagagatgcacgccgacttgttccgcgctgattactggcgcgcactacaaaaccgcatacgtgaagggcatgtggaagatgtttatgcgtatcggcgcaggcagcggtttagcgtccgattcgtataaatcagaggcgaaaaagtcagcgtattccaccgtacgccagcgtcacttccttcgccgctttaatcaccatcgcgccaaactcggtcacgcggtcatcggtaatacgtgaaatcggtccggaaattgaaattgcggcaaacggttcgcggtgctcatcgaaaatacacgctgcaaggcaacgcagccccagcgcatgttcctcatcgtcaaatgaataaccccgtttgcgcgtttgggcgagatcttcttttaaatgcacaggagacaccagcgtcgcgtgggtataggcatgtaaccctttgcggtgcagcagcttcgtcacctgttcttcgctcagttgggccagaaaggctttacccgcaccggaagcgtgcatcggcaatttaccgccgataggcgcggacatacgcatcaggtgagtacactgtacctggtcgataataatcgcttcgtgattgctttgatcaagcaccgccatattgaccgtttcgccagactcttccattagattgcgcaggatagggtgaacaatcgctaacaaattacggctctggagaaagctgctaccgaccataaaggcgtgtgcgccgattgcccagtgacccagttcgccgacctgacggacaaagccctgttgctgcatcgtggttagcaggcggtgggtcgtggaattgggtaacccggcttgctgtgccagttccgtgagtgccacactgccattggattcggcaatccactccagtaatttcaggccacgcgttaaagactgaacctgtccagtcgctggtgcggtggcaacggcgggttttctgccgcgttttgcgggaatgggtgcgaccatgacagtctcctttttctgtatcgtggaaatcattttcatttttattatcagcgaatgcaatagttgctgaacagatccgatgagttaatgttgaacaaatctcatgttgcgtggtggtcgcttttaccacagatgcgtttatgccagtatggtttgttgaatttttattaaatctgggttaagcgtgtcgggagcaagtgtgagcagcaaagtggaacaactgcgtgcgcagttaaatgaacgtattctggtgctggacggcggtatgggcaccatgatccagagctatcgactgaacgaagccgattttcgtggtgaacgctttgccgactggccatgcgatctcaaaggcaacaacgacctgctggtgctcagcaaaccggaagtgatcgccgctatccacaacgcctactttgaagcgggcgcggatatcatcgaaaccaacaccttcaactccacgactattgcgatggcggattaccaaatggaatccctgtcggcggaaatcaactttgcggcggcgaaactggcgcgcgcctgtgctgacgagtggactgcccgcacgccggagaaaccgcgctacgttgccggtgttctcggcccgaccaaccgcacggcgtctatttctccggacgtcaacgatccggcattccgcaacatcacttttgaccagctggtggcggcttatcgagaatccaccaaagcgctggtggaaggtggcgcggacctgatcctgattgaaaccgttttcgacacccttaacgccaaagcggcggtctttgcggtgaaaacggagtttgaagcgctgggcgttgaactgccgattatgatctccggcaccatcaccgacgcctccgggcgcacgctctccgggcagaccactgaagcgttttacaactccctgcgccacgccgaagcgctgacctttggcctgaactgtgcgctggggccagacgaactgcgccagtacgtacaggaactgtcgcgtattgcggaatgctacgtcaccgcccacccgaacgccgggctgcccaacgcctttggtgaatacgatctcgacgccgacacgatggcaaaacagatacgtgaatgggcagaagcaggctttctcaatatcgtcggcggctgctgcggcaccacgccacaacatattgcagcgatgagtcgtgcagtagaaggattagcgccgcgcaaactaccggaaattcccgtagcctgccgcttgtccggcctggagccgctgaacattggcgaagatagcctgtttgtgaacgtgggtgaacgcaccaacgtcaccggttccgctaagttcaagcgcctgatcaaagaagagaaatacagcgaggcgctggatgtggcgcgtcagcaggtggaaaacggtgcgcagattatcgatatcaacatggatgaagggatgctcgatgccgaagcggcgatggtgcgttttctcaatctgattgccggtgaaccggatatcgctcgcgtgccgataatgatcgactcctcaaaatgggacgttattgaaaaaggtctgaagtgtatccagggcaaaggcattgttaactctatctcgatgaaagagggtgtcgacgcctttatccatcacgcgaaactgttgcgtcgctacggtgcggcagtcgtggtaatggcttttgacgaacagggccaggccgatacccgcgcacggaaaatcgagatttgccgtcgggcgtacaaaatcctcaccgaagaggttggcttcccggctgaagatatcatcttcgacccgaacatcttcgcggtcgcaactggcattgaagagcacaacaattacgcacaggactttatcggcgcgtgtgaagacatcaaacgtgaactgccgcacgcactgatttccggcggcgtttctaacgtgtcgttctcgtttcgtggcaacgatccggtgcgcgaagccattcacgcggtgttcctctactacgctattcgcaatggcatggatatggggatcgtcaacgccgggcaactggcgatttacgacgacctgcctaccgaactacgcgacgcggtggaggatgtgatcctcaaccgtcgcgacgatggcaccgagcgtttactggagcttgccgagaaatatcgcggcagcaaaaccgacgacaccgctaacacccagcaggcggagtggcgctcgtgggaagtgaataaacgtctggaatactcgctggtcaaaggcattaccgagtttatcgagcaggataccgaagaagcccgccagcaggctacgcgtccgattgaagtgattgaaggcccgttgatggacggcatgaacgtggtcggcgacctgtttggcgagggcaaaatgttcctgccgcaggtggtgaaatcggcgcgcgtaatgaagcaggcggtggcgtatctcgagccgttcattgaagccagcaaagagcagggtaaaaccaacggcaagatggtgatcgccacagtgaagggtgatgtccacgacatcggtaaaaatatcgttggcgtggtgctgcaatgtaacaactacgaaattgtcgatctcggcgtgatggtgcctgcggaaaaaattctccgtaccgctaaagaagtgaatgctgatttgattggcctttcggggctgatcacgccgtcgctggacgagatggttaacgtggcgaaagagatggagcgtcagggcttcaccattccgctattgattggcggcgcgaccacctcaaaagcgcacacggcggtgaaaatcgagcagaactacagcggcccgacggtgtatgtgcagaacgcatcgcgcaccgttggtgtggtggcggcgctgctttccgacactcagcgcgatgatttcgttgctcgtacccgcaaggagtacgaaaccgtgcgtattcagcacggacgaaagaaaccacgcacaccaccggtcacgctggaagcggcgcgtgataacgacttcgcttttgactggcaggcttacacgccgccggtggcgcaccgtctcggtgtgcaggaagtcgaagccagcatcgaaacgctgcgtaattacatcgactggacgccgttctttatgacctggtcgctggccgggaagtatccgcgcattctggaagatgaagtggtaggtgttgaggcgcagcggctgtttaaagacgccaacgacatgctggataaattaagcgccgaaaaaatgctgaacccgcgtggtgtggtgggcctgttcccggcaaaccgtgtgggcgatgacattgaaatctaccgtgacgaaacgcgtacccatgtgattaatgtcagccaccatctacgccaacagaccgaaaaaaccggcttcgctaactactgtctcgctgacttcgttgcgccgaaggtttccggcaaagcggattacatcggcgcatttgccgtgactggcgggctggaagaggacgcactggctgatgcctttgaagcacagcatgatgattacaacaaaatcatggtgaaagcgcttgccgaccgtctggcggaagcctttgcggagtatctccatgagcgtgtgcgtaaagtctactggggctatgcgccgaacgagaacctcagcaacgaagagctgatccgcgaaaactaccagggcatccgtccggcaccgggctaccctgcctgcccggaacatacggaaaaagccacaatctgggagctgctggaagtggaaaaacataccggtatgaaactcacggaatccttcgccatgtggccgggtgcatcggtttcgggttggtacttcagtcatccagacagcaagtattacgcggtggcgcaaattcagcgcgatcaggttgaagactatgcccgccgtaaaggaatgagcgttaccgaagtcgagcgttggttggcaccgaatctggggtatgatgccgagtaagtgataacaccggggtatttgccccggtttttaatgtcataaataatggattattgaacatgataaaaattgatgaaatagattttttcgctttcgaaggatgttcagagtccgaagttactgaactattaggaaaaaaaccaacaggttataatgattggatgattaatataaaaacaggtgtggagtgggtattttatgatggtcgttattggttagattttcgtaaatccaaagagggtataaggtgtatctcatgcagtattctgtatcacgataaaagtaaagggcgtatcgatgtcttatttagtgaaggtatagctgacagaggtttaaaaaatacgggtggagtgttaatccaaaaacgcccgcaattataataattcctggtaatatttgttttcgtaaaaaggatttactttatgcaacgtcaatataaaaaatacattcttcttttttggggtgtcatggatgttatcgcgatagccacatatctgttctactcgcttggtaatggtcgtatccctttttattccgatatcgttcattcactttctttacttaaggatatcggtgttgaaggcggtttttacgcttatgcagtcgccactgttacgctacaaatagtattattgctctctttattcttttctgcgcaatgttttttaagacaaaaattatttagtttctcttttttggcgattcaggaagttatgcgttttgctaccgtaagctgctcaatctccgtaataccgttgttacttaattattttcattcacagaatctggtcttaaatatttcgttgtttatcttctcagaggtcacaaaagtgacaacgattatctggtgtaaacgacaggggaaagtgtgacagaaatagcaacagatacaggtggatttttatataaatgcctttttaaatgctttcttgtataaatctcttatactgaaagtacatacaagagaaatgcctggataaaaacaacgtgattagaaaaatcttaacaggaaaatgcataacaaaaaggagaacctgattccgtgctaactttgcttcacctgctttctgccgtcgccctgctggtctgggggactcatattgttcgaacaggcgtaatgcgcgtcttcggcgcgcgtctgcgtactgtccttagccggagcgtcgaaaaaaagccgctcgccttttgcgcggggatcggcgttaccgcactggtgcagagcagtaatgccaccaccatgctggtgacctcgttcgtcgctcaggatctggttgctctcgcgcctgcgctggtgattgtgctgggtgcagatgtcgggacggcgctgatggcgcgtattctcaccttcgatttatcctggctgtcaccgttacttatttttatcggcgtgatttttttcctcggacgcaaacagtcacgcgccgggcaactgggccgcgtcggtattggtcttgggctgattttactggcgctggagttgattgtgcaggccgtaacgccgatcactcaggcaaacggcgttcaggtgatctttgcctcgctgactggcgacattttgctggatgcgctgattggtgcgatgttcgccattatcagctactccagccttgccgcggtactgctgaccgcgactctgaccgccgcaggcattatctctttcccagtggcgctttgtctggtgattggtgcaaacctcggttccggcctgctggcgatgctcaacaacagtgccgccaatgccgcagcccgccgtgtcgcgctgggtagcctgctgtttaagctggtgggtagcctgattatcctgccgtttgttcatttgctggcagagacaatggggaagttgccattgccaaaagcggaattggtgatctatttccacgtcttctacaaccttgtacgctgcctggtcatgttgccattcgttgacccgatggcacggttttgcaaaacgattattcgcgatgaaccggaactggatacccagctacggcctaaacatctggatgtcagcgcgctggatacgcccacgcttgctctggcgaacgctgcccgcgaaaccctgcgcattggcgacgccatggaacagatgatggaagggttgaataaagtgatgcacggcgagccacggcaggagaaagagctgcgtaagctggctgatgacatcaacgttctctataccgccattaagctgtatctggcgcggatgccaaaagaggaactggcagaagaagagtcgcgccgctgggcggagatcatcgaaatgtcgctcaaccttgaacaagcctccgatatcgtcgagcgcatggggagtgaaattgccgacaaatcgctggcagcaaggcgagcattttcgcttgatggcttgaaggaactggatgcgctctatgagcaattgctcagtaatttaaaactggcaatgtcggttttcttctctggcgatgttaccagcgcccgtcgtttgcgccgcagcaaacatcgttttcgcattcttaatcgccgctattcccacgcccacgtcgatcgcctgcaccagcaaaacgtgcagagtattgaaaccagttcgctacatttaggcttactgggagatatgcagcgtctgaactcgctgttttgttcggtggcttacagtgtgctggaacagccggatgaagatgaaggacgggacgagtattaataccgtgaccctgaaggcctgataagacgcgtaaagcgtcgcatcaggcactatgaacaagatgccggatcatgtatccggcaattcacttaaaaacggtgacccgcttccagcggcaccgcttcttcaccagccttaaacacataagtggtgttcgggccacccagcgtagcgtgacctttacttactgtgatccagttaccttccggcagaccaataatcgtcagttctggcgcgacgaccagcagttcgcgaatacgctgctcacgggtttcacctttatggccttccggcagcgcgttggtgaagtgcgggttgatttgcagcgggaacagatttagcgcatcgaaaccttgcggatcgacaatcggcatatcgttggtggtacgaatggttgggcaagcaaggttagcgcctgcgctccagccaatatacagcgcgccacgtttcaccacgtcagtaattggtgccagcagcccacgctcgcggcactgtttcagcaactggaaagtattaccgccgccgacaatcacaatttccgcattttcaatcgcggcaacgggatcgacaacgctatgaataccggtgacagaaacacccagcgaagcgagaaccgcagcagttttcgctgtgtaatcatcccaggtctgcgttacgccagcgaaaggaataaataccgcagaacggcgaccctgcaactgttcagcaatcagcggcagcgcgtgttccagccaggctttacccggcagcgtcgagttactcaataaaagcagttccattacttctccggttagtaagaaaacacggaaggaatgctaccactgcgaatttaaccacttactgacatggctcacgatgtcacatattgcacaggcgctgagactgatgacaaacacaggattgcctgatgcgctacgcttacctggcctaccagataactgcaatatattgaattttcaagattatgtaggccgaataaggcttcattccgtatccggcataaacaatgtgtactttgccaccaatttgagcgccccttaaggcgctgatgtttttttattcttctcgtgcacattgtgccgcttcagcaatcagccgcacatcaggtcgcgaagttgccgcggcgaccagccagcgacatgcagagttaagtagcgcgattaatcatgggaaattgcctctgcatgggcgagcaggtattgctccgcctcaccggaccagatcccctgatgacgcgccagaatcgccgccagtgcttgatcctgaatctgcgtgagtgacgtcagcggcaggaatttcccggtatacaccagctttttgccgccgccgacggcaggcaattcaagcgtggtttcgcccgcggcattcagcccaagaatatgtgttaccacttttgcggcctgcacttttttctcttcaatcaatttgaccgctgcgcgcatgtcgtcgatattgccgcctgacgtgcccacgtagtgggtaaatgcataatgcacatcgtagaaattaattggcgcgctgaagtgcttatcctgcggtccggcgaagaaattcagacaaccatctgttgccagcaaggaagaggcgagagtcaccagtccttcattaggcacaaagacgaaaatatcatcgaagccgtgaccgccactcagtgccattaacgtatcaaatgctgcatcggcggcattgagataatgaatcagtgtttgcggttctgatggatagtgcttgcgtgcataactcaatttgtcgttgtcggtatcggtaatgacgagcagcgacgggttaaccggtccatgcaacgcataatcaatcgccagcagccccatcgggccggtgccgccgaggatcagcgtgcgcccttgcgggcgaatccccatcgtgtggttataactaccttcctgaagatgatagttggcgttgaacgcgccaatcacgcaggaaagcggttcaaccagcgagccttcaaaataggtttcgccgtcgtatgccagcaggcaatcttgttccatgacctcgttgggaataaccacatgcgtcgcttcgccgcctacccacgggaaggagtagccggggcaatccgggcggtcggggagttgcaggttggcctgaatcacataacgctgacccggctggaatttgtgctgccactttttacccacggccagaatatcgccgcaaaattcgtggccgatgatgatgggattggtcgccacatcgtcgggtacttttttatggttttcacccagattggcctctttccaggaagagaggcacaggctgtcagtgaccaccgttgcgaggatttcatcctcctgcatttcaggaaggtcaaaggtttccagacgcaggtcacgtttgccataaagacgcagagctgttgttttcataaaccacctcatgttgaacgatggccccgacggttgcgccggggcgaagaatcaggacaggaagcccagcgcattaccgataatccctaaaccaaacagggcgaaaatcagccataccgggttaatttttttgttgagcagacgaaccatcagcagcgtcagaccgagcgccagcaaaccagggcaaagttggtcgaggatgttctgcacggttatggtgacggtggcaccatcggcggcaggcgtttgtgaaaccaccaacggtacgttgattgacgtccatttggtcaccagcacgcccatcacaaacagcccgagaatcgacgcgccttcggtgagtttttgcagcaaattaccgcccatatcgctgacgatattcacccctttgcgaaagccgagctgtaggccataccacttcatcgccagacgcaccgcgttgaaaataaagaagaacagcagggggccgagaatgttgcccgaaagtgccagagatgcgccgagcgcggcggtaatcgggcgcagcgttccccagaccagtggatcgccaactcctgccaatggtcccatcagaccgactttgatgccgttaatggtaccgtcatcaatttccgcgccgttggctcgcgcctcttccatggcggcagtgacgccgatgaccgggccacatacggctggcgtggtattgaagaacaccaggtgtcgcctgagcgccgcaacctgatcctcttttaatgggtaaagtcgtttgatggcggggatcatgtcgtagcaaaaacccagcccgtgaatacgttcaaagttaaaggatgcctgttgcaggttggagcgcagaaacatgctcaccagatcgctgcgtgtaatttttctctgttccatgatggctccgttaatcatcaagttggtcaagggcggtgatagtggtggtctggggatgtggttcagctttacgccactgtggatttaactggatgtagagcagggccatgatcacgccgacgccaccgaacgccagcagactgagatcgaggtagccacctgcgaggaaaccgaggaaaaagaaaggcatcaaatatttcacgcccatcatgcgaagcaccatggcgtaaccgaccaccacgataaaaccgccagcaatctgcagtccacgggtcacaaattcgggaatggcgctcagcatattgctcaccatatctgcgctgacgaacagcgagacaatcagtgccggaatagcaacgcgcagtgcctgcacgccaagcgcggagacatgcagaatatcgagagtgcgaaaccgtgcttcttccgctgctttatccgccgcgtgctggaacactacggtgatggtacgggcaaacaccgtcagcacctggcctgccgcagccacaggcaacgcgatggcgattccggtggcgatgctttgctgaccaacgataaccagaatggcggagattatgctggcgagtgcagaatccggagattgcgccgcgccgacgttcatccagccgagagctatcaattccagcgtaccaccgagcataattccggtttttaaatcaccgagaattaaaccaatcaccgtacaggcaattaacggacgatgagtctgaaattcatccagcacgctgcccattccggcaatacaggaaaaaagaaatatagcaatgatttgtagggtacttatttccatgatttgtcaccttttaagtgtcgtcatccctgcctgttaaagcatatgtacacaggcgctattatttaatttgcgattaactgttcgtttattttgtcgataatattgattgagggatctgacgctacgacgcgtaaatccagtatgacgccaagattatttaactcatgaaatgcgttaatatcatcgtcatctaatgaaactgctttggttaactgtttcttaccaggacgccaggccataccgccaatattcagggtacctatttttaccccctggcgaaccattgctaaggcatcctgtgggcgagtgaaaagataaaaaacggtttcgtcctgatattgcgggttgtgataaaccgcgacggctttttcaatattgaccacgttaaccttcattcccggtggcgcagcctgacgcaataatgtccggcgaacttcatcgttataaacttcgtcattgcagataataatgcgttgggcgttagccactttagaccagacggtagtgacctggccgtggatcaggcggtcatcaatgcgggcgagcgtaatgttcatcagaaatcctcctccgctgttgccacctgtctccagacgacgcaggtttgctttgcgatttgcgtcaggtgttcacacagttcatcaatattcatgctgtcctggttatcaaccagttcgagcgccagcggcagagaaaggccgctgattacccgcagacgaggattgcgcatcgcaagcatcgctgccgcattccacgggctgccgcactgtaaatccacggcgattagccactcatcttgattgtgaatgcttactaacttctccagctttgccacaatgtctccggcgttctcgccgggcacaaattcaacggcctcgaccctggcatcgccgtacaccatctgaaccgattccagcatggcgcaggctaatttgccgtgggcgcaaaaaatggcattgaccataaagcctccttagccgcgcgttttgccgcctgcaatgttagtggttactccggtgatatagctggcgcgttcagacagcagataacaaacaaaatcagccacttctgctaatcttccggcgcgcccaataggaatggcgtttttggtatagccttcacgcagctgctcgacggtgatattgcgcgtccacgccagcgcttcttcatattccggcgtgcgcagtcctgttttttccagaatccccggcgcgataccgaccacacggataccgtgcttgcccagctctttcgaccaggagcgcgtgaagctattgagcgcggctttggtcgcggcgtaacagctttggccttctgagccttccagcccactttctgaggaaacattcacaatcacgccatcatgttgtttgaccatctgtcgcgccaccgcctgcgacatcagaaaaacgcctttctggttgatattgaccattttttcgaatgcagcttcgttgagttcatactgcccggcaggcgctttctcatcgacaagcagacgcgggaaattgaccccggcgttgttaaccagaccgtcgatgcgaccaaaacgctggataatttctgctaccgtatgatttatctctttggcgctggaaatatcggtcggccagaactgataacctttatggctttcatactgaccatcgccaccgtgaatatcgaccatctgtacattcgcgccttgtgctaataattcatccacaatcgccagaccaatgccggatgcgccaccggtgacaataatgattttatcctgcaaatttaaccacgtttgcataacagactcctgattttagataatagggacccgccgtaatttttattacggtaaacatcgggaagatttttatttcagtaatagttcagctgtgctgctattcgttaccagacaattaatatattttccacgcagtgcaccaacaattccgctgtatttttcttcgctcatggcaatgccaatggaataccgtgcctgctttaatttattcatttcgatagagagtgttttttcgctcatattcgtttcaaccattgcgccgtgaatatcaaaaaagcgcgagcaaatatcgccagcaacctggcgggcattcaggtcgtcactctcttcaccaccataaaacgcatgccagttagcgccgtcgcgaatggccggtgagccaattcccaccagggcgacatccagattatcccagtaggcagagatggttttaaagtgctgagactgcatgatcccattacgaattaatgggttatccagcagagccggaaaatccgcgagatgcgattcccctttcagcttcgctgccgcgctgtaggttaatgtgtttacgtgatagcggctttcgagtttaccggacgggccgccaataatcggcacgcaaattaactgccgcgattgccccgcctgcggcaagttttcaaccagtgcgctcaccgcgcggccccaggaaaaaccgacaatatcgccaggttccagcaagcgatccagcagttgcgcgccgtgtaaccccatcatcgccagttgagtatcttcatcctcatcatttcctgacaccaccacaacgtctttcaggctaaacttttgcttcacttgctgctccagccagagattttcgttgtagtcatagttgatggcgatggtgacaattccctgatcgcggcctcgtttaagcaagcggctgatggtagtgcgataaatacccagttcgcgcgcaatttgcgcctgcgtcatatcctgttcgtaatagagttgggcaatcttcacaatcaaacggatatcgtcactgttttccattgccgcctcctggttctgcacatttgtgcaaatacgctttctcaccgcttgatctgatataaccccatcatgatggcctttcaaagcgatttttcactctttgcatggggggaaatagcgctttctcttgcacatttgtttctctgcgtagtagtcatcagcacaggtgtgcagcgattcgtaatttgttgattattcttattttgccaggcaaatttgcatcgtacttccggagacacttttgtgataaaaggcgtggcagatcacatttaatttcgacgttgccgcataaccctgtttttccccgctaagaggtacggtatattccgcgttttacaggagaatttatgctgcccgactcatcagtccgtttaaataaatacatcagcgaaagcggaatttgctcacgccgcgaagcggatcgctatatcgagcaaggcaatgtgttccttaatggcaagcgagccaccattggcgatcaggtgaaacccggcgacgttgtgaaagtaaacggtcagttgattgagcctcgggaatccgaagatttggtacttatcgccctgaacaagcccgtcggtattgtcagcaccaccgaagatggcgagcgcgataacattgtcgatttcgttaaccacagcaaacgcgtgttcccgattggccgcctggataaagattcccaggggctgattttcctcaccaatcacggcgatctggtgaataagatcctccgtgcgggtaacgatcatgagaaagagtatctggtgacggttgataaaccgattaccgatgaatttattcgtggtatgggggcgggagtaccgatcctcgggacagtaactaaaaagtgcaaagtcaaaaaagaagcaccgtttgtcttccgcattaccctggtgcaggggctgaaccgtcagattcgtcgcatgtgcgagcactttggttacgaagtgaaaaagctggaacgtacgcgcattatgaacgtcagcttaagcggcattccgctgggtgagtggcgcgatttaaccgacgatgagttaatcgatctctttaagctcattgaaaattcctcttccgaggcaaaacctaaagcgaaggccaaaccgaaaacggtaggcatcaaacgtccagtcgttaagatggaaaaaacggcggaaaaaggcggtcgcccggcgtccaacggtaagcgttttacctcgccggggcgcaaaaagaaggggcgttaatcagcgcctgccgcgcgtcgacgtatttgctgaccagctaaatgacgcctcaggatccggtttataagcctgctttttcttcaattggcgggcttttttcgcttcagcctcacgctcgaccattaatttatcgatgtactctttcttaatgctgttagtttcggagttggtcagtacgcgaccatgcgcaatccgcgcccgatccagcagtgttttaagttcacgctgctcgcgttcagtcatctctttttgggtaatacgggggagtgccatgatggtgccctcagtgagccagagagttcagtgtacgggaattcgtttgcgagcagaactgataatattcattttgccttctcttaactatttatctctttcgataattagttagagatgcggataaaaaattaaaggcaattattctccgataaagacgctggttaacagagtacaggctcgtttatttatgggcataatgacaagaaaaacaatacggcccgaaataatgtcttccgggccatactgtgtttactcaaataaattaaaatgcagcttctgcactacctgctcggcatcttcgccgggcaccaggaagcacaggttatggctggatgcgccgtaacaaatcatgcgaatgttgaacggttccagtacgccgaatacctctttgccaacgccgcaggcttttgacaggtcattgccaatcaacgcgaccagcgccagaccctcttccacttccacccggcacagtgcggaaagctccatcagcagggattgcgtcagcaacgtatcgccagtggaggttgaaccggtggtatcaagggttaatgccacactcacttctgacgtggtgattaagtctaccgaaatattatgccgcgcgaggatgccgaaaacttccgcgaggaaaccgcgagaatgcagcatattcaggctgtgcaaagtgagcagagtctgattgcgacgaagcgccagcgcgcggaacagcggcggattttcagttttattgcacaccagcgtaccacctgcgcgtgggtctttgctggagccgacaaagactgggatatcgctgcgtactgcgggtagcaacgttgccggatgcagtacttttgcaccaaaagttgccatctctgccgcttcggcaaacgcgatttcatcaatgcgttttgctgcggaaaccacgcgcggatcggtggtgtagatgcccgggacgtcggtccagatatcaacacgagatgcgtgtaaagcctccgccagcaaggctgccgtataatcgctgcctccacggccaagcgtcgttgtacgacctttattttcgctgccgataaatccctgggtgatcactaagccttcattgaggcgtgggagcagctgcagcgcggccagttccgccagcgcggctacatctggctctgcacgaccaaatcgatcgttggtacgcatcactttacgtacatcaaaccactgtgcctgaacatcgcgttcgcgcaggatctcgacaaacagcagggtcgacatcagctcgccgtggctgaccagttcatctgtcagcgccggagacgttgccagcgccgccgcttctgccagaacagtaatgttctccagcagacgttcaatctcttcacggataacgttcgggtaacgcagacgttccagaatggcaaactggatgttgcgaatagcgtcgagtttttcgaatcgctcgccaggttccagtccttcagctaaagcgaccagcagattagtgataccagcagaagccgagaggacaactaaacgcacgttggcatcagaaagcacaatatcagcgctgcggttcatggcgtcaaaatcagctacgctggtaccgccaaatttggagacaacaatttcagacataactacctcgtgtcaggggatccattttcagccttggcacaagggaagagcggaagacgggtgggcgcagagcgatacttcgctactattttcacccagaagtgctccaccacttgcgaaacgcccgactgcgaacgcttctggtgacaacccaggggatttagcccctgtagccgatgatgaacgtggccagccgttcaatcacctcggcgatgcaccccctcaggtgttatcacaggactggctcctccaacaccgttacttgggcaacgcgcctcttctggcctgcgctagcgcaggtagtacatttataaataaagggtgagcggggcggttgtcaacgatggggtcatgcggatttttcatccactcctggcggtcagtagttcagctaataaatgcttcgctgcgctaagggtttacactcaacattacgctaacggcactaaaaccatcacatttttctgtgactggcgctacaatcttccaaagtcacaattctcaaaatcagaagagtattgctaatgaaaaacatcaatccaacgcagaccgctgcctggcaggcactacagaaacacttcgatgaaatgaaagacgttacgatcgccgatctttttgctaaagacggcgatcgtttttctaagttctccgcaaccttcgacgatcagatgctggtggattactccaaaaaccgcatcactgaagagacgctggcgaaattacaagatctggcgaaagagtgcgatctggcgggcgcgattaagtcgatgttctctggcgagaagatcaaccgcactgaaaaccgcgccgtactgcacgtagcgctgcgtaaccgtagcaataccccgattctggttgatggcaaagatgttatgccggaagtcaacgcggtgctggagaagatgaaaaccttctcggaagcgattatttccggtgagtggaaaggctataccggcaaagcaatcactgacgtagtgaacatcgggatcggcggttctgacctcggcccgtacatggtgactgaagcactgcgtccatacaaaaaccacctgaacatgcactttgtttctaacgtcgatgggactcacatcgcggaagtgctgaaaaaagtaaacccggaaaccacgctgttcctggtagcatctaaaaccttcaccactcaggaaaccatgaccaacgcccacagcgcgcgtgactggttcctgaaagcggcaggtgatgagaagcacgttgcgaaacactttgcggcgctctcaaccaacgccaaagccgttggcgagtttggtattgatactgccaacatgttcgagttctgggactgggtcggcggtcgttactctttgtggtcagcgattggcctgtcgattgttctctccatcggctttgataacttcgttgaactgctttctggcgcacacgcgatggacaagcatttctccaccacgcctgccgagaaaaacctgcctgtactgctggcgctgattggcatctggtacaacaatttctttggcgcggaaactgaagcgattctgccgtatgaccagtatatgcaccgtttcgcggcgtacttccagcagggcaatatggaatccaacggtaagtatgttgaccgtaacggtaaggttgtggattaccagactggcccgattatctggggtgaacctggcacgaacggtcagcacgcgttctatcagctgatccaccagggaaccaaaatggtaccgtgcgatttcatcgctccggctatcacccataacccgctctctgatcatcaccagaaactgctgtctaacttctttgctcagaccgaagcgctggcgtttggtaaatcccgcgaagtggttgagcaggaatatcgcgatcagggtaaagatccggcaacgcttgactacgtggtgccgttcaaagtgttcgaaggtaaccgcccgactaactccatcctgctgcgtgaaatcactccgttcagcctgggtgcgttgattgcgctgtatgagcacaaaatctttactcagggcgtgatcctgaacatcttcaccttcgaccagtggggcgtggaactgggtaaacagctggcgaaccgtattctgccagagctgaaagatgacaaagaaatcagcagccacgatagctcgaccaatggtctgattaaccgctataaagcgtggcgcggttaatcattgtcgatatgtaggccggataaggcgttcacgccgcatccggcaaccgatgcctgatgcgacgcggtcgcgtcttatcaggcctacaggtcgatgccgatatgtacatcgtattcggcaattaatacatagtacgattgattaaatagccttaaaaacaatgccgactataagtcggcattgttttatcagataaatcctcttgtctgtcatttaacgaaaatcataccgtgaggttaatcctaaaataaatttttaatcgtggtttatttcggaaaatacgcagagtaattactttttattttattttaacttcatgatttttaatcttatttatatataagtcaaagcttatatttgatattcattccaattgtcctaaaactccatcactaattccccgcgccgtaattcgcatgctttagttgtgtatactcgatcccgcccgaaatgttttgggtaaatctccattcattcaatgaagggaaattgttatgaaaaaagttctgtatggcatttttgccatatctgcgcttgcggcgacttctgcgtgggctgcacctgtacaggtgggcgaagcggcaggatcggcagcaacgtcggtttcggcggggagttcctccgcgaccagcgtcagcaccgtaagctcggcggtgggtgtcgcgctcgcggcaaccggtggcggtgatggttctaataccgggaccaccacaaccacgaccaccagtacccagtaataaagtatgtatccccaaaataattcgagttgcaggaaggcgacaagcgagtgagtccccgggagcatagataactatgtgaccggggtgaacgagtgcggtcaccgcatctgcagcttgaagtatgaaggggattaaccataaccacactccggtgtggttattctgcccctctggagaagagtcgtgaagcgacctgcactcattcttatctgcctgctattacaggcctgttcagccacgactaaagagctgggcaattcactatgggacagtctgttcggtacgccaggcgtacagctgacggacgatgatattcaaaatatgccctacgccagccagtacatgcagcttaatggcgggccgcagttatttgtggtgctggccttcgctgaagacggacaacaaaaatgggtcactcaggatcaggccacccttgtcacacaacatggtcgtctggtgaagactttgcttggcggcgacaacctgattgaagtgaataaccttgccgccgacccgctgattaaacccgcacaaatcattgatggtgcaacctggacgcgcacgatgggctggaccgagtaccagcaggtacgctacgccaccgcgcgctcagtcttcaaatggaatggcaccgataccgtcaaagtcggcagcgatgaaaccccggttcgcgtgctggacgaagaagtcttcactgaccaggcgcgctggcataaccgctattggatcgacagcgaagggcaaattcgccagtcggaacagtatctcggcgcggattacttcccggtgaaaaccaccctcatcaaggcggcaaaacaatgattaaacaaactattgtcgcgttgcttttgagtgcgggggcgtcatcagtcttcgcggcgggaaccgtcaaggtgttcagcaatggcagcagtgaggccaaaacgctgacgggcgcagagcatttaatcgatctggtaggccaaccgcggctggcaaacagctggtggcccggagcggtgattagcgaagagctggccacggcggctgcattgcgtcagcagcaggcgttgctgacacggctggcagaactggctgcagattccagcgccgacgatgccgccgcgattaacgccttacgccagcaaattcaggcgttgaaggtgacgggcaggcaaaaaatcaatcttgatcctgatatcgtccgcgttgccgaacgcggtaacccgccgttgcagggcaactacacgctgtgggtcggaacgccgccgtccacggtcacgttgttcgggcttatcagtcgtcctggcaagcagtcattcactccaggtcgcgacgtggcgagctatctctctgaccagagcctgctcagcggtgcggatcgcagctacgcgtgggtggtttacccggacggacgcacgcaaaaagcgccggtggcttactggaacaagcgtcacgtagagccgatgcccggcagcattatttatgttggcctcgcggactccgtctggagtgagacacctgatgcccttaacgccgacattcttcagactctgacgcagcggataccccaataatgaaaaaaagacatctgcttagcttactggcgctgggcattagcacagcttgctacggcgaaacatatcctgcgcccattggtccgtcgcaatcggatttcggtggcgtaggattattacaaacgcccaccgcgcgcatggcgcgggaaggggagctgagcctgaactatcgcgataacgatcagtaccgttattactcagcttcagtgcaactcttcccgtggctggaaacaacgctgcgctacaccgacgtgcgcacccggcagtacagcagcgtcgaagcgttctctggcgatcaaacgtataaagataaagccttcgatctcaaactgcgtttgtgggaagagagttattggctgccgcaagtggcggttggtgcgcgggatatcggcggtacggggctgtttgatgcggaatatcttgttgccagcaaagcctggtggccgttcgattttacactcggcctgggctggggatatctgggcaccagcggtaacgtgaaaaatccgctctgttcagccagtgataaatattgctatcgcgataacagctacaaacaagcgggatctatcgacggcagtcagatgttccacggcccggcctcactgtttggcggcgtggaataccagacgccctggcaaccgctgcgcctgaaactggagtatgaaggtaataattatcagcaggattttgccgggaagctggagcaaaaaagtaagtttaacgtcggggcgatttatcgcgttaccgattgggccgacgttaaccttagctatgaacgtggcaacacctttatgtttggcgtcacgctgcgcaccaactttaacgatctgcgcccgtcctacaacgataacgcccgaccgaaataccagccgcaaccgcaggatgccattttgcagcactcggtggtggcgaatcagttaacgctgttgaaatacaatgccggactggccgatccgcagatccaggcgaaaggcgatacgctgtatgtcaccggcgagcaggtgaaatatcgtgattcgcgcgaagggatcatccgtgctaatcggatcgtgatgaacgatctgcctgatgggatcaaaacgatccgcattacggaaaatcgccttaacatgccgcaggtgacgacggaaaccgatgtcgccagcctgaaaaatcatctcgccggagagccgttgggccacgaaacgaagctggcgcaaaaacgcgtcgagccagtggttccgaagtccaccgagcagggctggtatatcgacaaatcgcgctttgattttcatattgatccggtgctgaaccagtcggtcggtggcccggaaaacttttacatgtatcagctgggcgtgatgggaacggcggatttgtggctgacggaccatctgctgaccaccggcagcctgtttgctaaccttgccaacaactacgacaagtttaactacaccaatccaccgcaggactcgcacttaccgcgcgtgcgtacccatgtgcgcgagtatgtgcagaatgatgtctatgtgaataacctgcaagccaactacttccagcatctgggcaacggcttctacggtcaggtctacggaggttatctcgaaaccatgtttggcggcgtgggagcagaagtgttgtatcgcccgctggatagtaactgggcgtttggtctggatgccaactacgttaaacagcgcgactggcgtagcgcaaaagatatgatgaaattcaccgattacagcgtgaaaaccggacatctgaccgcgtactggacgccatctttcgcccaggacgtgttagtgaaagcgagcgtcgggcagtatctggctggggataaaggcggcacgctggagatcgccaaacgctttgatagcggcgtggtggtggggggctatgccacgatcacgaatgtttcgaaagaggagtacggcgaaggggacttcaccaaaggcgtgtatgtctctgtaccgctggatctcttctcgtctggcccgacacgcagccgtgcggcgattggctggacgccgctgacgcgtgacggtggtcagcaacttgggcgtaagttccagttgtatgatatgaccagcgaccgtagcgtcaatttccgctaagtcatgggaaaggtgccagttttcgcactcactggcaccttcattcttaatggcctgtcgagccatcaggaacgcagttcacccccggtttgcgatctggtgtgtaaaggcgaaaacattctgtcttcctgtccgtcgatatcggttgcaggtctggttgcctgagcgactgggccatcattgggctggagacattgctttgcggtaggtcggctttatcagcagtaccgagcggaccagcataagcaggaagaacagagactgataacatcaaagcagcaaaataaggcttcatttttaccacctttatcaggttacgtttcatttgttccagaggaacattgtcgatttttcgcgcattgctggtggcagggaatcacctgaatgggtgatttttttgggctgtgtgttttgccagatgagacattgatgggagatgcccacttaattgagctgaacaaaacatacacaaaaaatatagatctccgtcacatttttgcgttatacaggaagctcgccactgtgaaggaggtactgctatgacgtcactctctcgtccgcgcgtggagtttatctccaccattttgcagaccgtactcaatcttggcctgttgtgcctcggcctgattttggttgtcttcctcggcaaagaaacggtgcatctggctgatgtgctgttcgcgccagaacaaaccagtaaatatgagctggtagaagggctggtggtttactttctctatttcgaatttatcgcgctgattgtgaagtactttcagtccggttttcacttcccgctacgttactttgtctatattgggatcaccgccattgtgcgcttgatcatcgtcgatcataaatcgccactggatgtgttgatctactcggcagcgatcctgttactggtgatcaccctgtggttgtgtaattcgaaacggctgaagcgggagtaaaaaaaggcgctccgtggagcgccgaataacagtcacaagttgggataacgtaagttgagggtgcagcggcataacattggcagaacaacatctttaacctttcacaccacctgccgtcaggccgttgaccagccagcgttgagccagcaagaagacgatggtgatcggtaatgcagacatcacggcagcggcggcaaagtcaccccacaggtagttttgcgggttgaggtattgctgcatccccacggccagggtgtagctgtttacgtcacgcagtaatagcgacgcgaccggaacttcagtaatggcagcgataaacgacaggatgaacacaaccgccagaatcggtactgacagcggcaacaggacaaggcggaaggcctgccacggtgtcgcaccatccagcgccgccgcttcttccagcgaactgtcgatggtttcgaaataacctttgatggtccagacatgcagcgcaatcccgcccagatacgcgaaaattacgccgccgtgagtattcaggccaatgaatggaatgtactcacccagacgatcaaacaacgcatacaacgcgaccagtgaaagtactgccgggaacatctggaaaatcagcattcctttcagcagcgtcgctttgcctggaaagcgcatacgggcgaaagcgtaggcgcaggtggtggagagcgccacaatgccaatcgcggaaatcccggcgacctttaccgagttccacagccacagcagtaccgggaatggcggtggcgtaatgcgaccatcagcctgttccacgctaaaacctaacgccagtttccagtgatcccaggagatttgctccgggatcagactaccggtcgcgaagttcccctgacgcagcgagatggcgacgaccatcagcagcgggaacataattgccgcgataaaaagtagcagtagcaggtgagtaataaacaaacgtgctttttgcgatttcggttggaccattgccatttttgttatctcccttaatcaaacttcattcgcgtggctttcaggttcactatcgccagcgcgcccaccagcaggaagatcagcgtggcaattgctgctgccagaccgaagtcctgacccccgccgccttcaaaagcgatacggtaggtgtagttaacaagcaggtcggtataaccggctggcgtggtcgtgccaagacgatccgggccgccgttggttaacagttgaatcagcacgaagttgttaaagttaaaggcaaagctggcgatcatcagcggtgtcagcggtttaatcagcagcggcagcgtaatcttaaagaagttctggaatggacctgcaccatccattgctgaggcttcatacaaatcgtccggaatcgctttcagcaagcccatgcagaggatcatcatgtacggataacccagccaggtgttgacgataatcagcatcgtgcgggcggtggtcggatcgctgaaccaggcgggcttcacgccaaacagcgcgctcaacatcatgttgatttcaccgaaactctggttaaacaaccctttgaaaatcaagattgaaatgaacgatggcaccgcgtagggcagaatcagcaggacgcgatagaccgctttgccgcgcaacgcttcccactgcaccagacacgccagaaccatgccgaccgccaccgttaaaaagacagtgatcagcgagaacaccacggtccagacgaaaatggcgaggaacggtttctgaatgccttcgtcggtaaagacgcgggtaaagtttttccagccggtggtcacggtgtaaccggggcttaacttttcatcaccccagttgccatcggcggtaatggactggtaaaagccaatttggttattcggacgatatttcacgccgctctgattattcgtcaacgtgccgtcaccgtcgagtgtgtagagcggttgcgtgccagaaaactggcgcagggagctcatcatcactttgttgccatccggcagaatggcggtaatgtcactcagtgcctgacgattctgggtaatcacgcgcagattcgcgcgctcgccttcaggctgcgtggcgctttctttcaattgcagtttttgctcgccgccaaatttgaaagcgtcggagaggtaatttttgccggtttcgccgtcgctgagcgccagttgccactcatcgcccgccggataaagaccaaaattatagattttgcctgcttgccaggagcgatctagcaacacttcctgcgcacgttcaaaagtcagctggttagtgctgctgtagttggtgaaggcaatggcgatggtgcagaccagagggaagaggacgaataatcccattccagccattcccgggtaaacatagcgccaggcgtaggctttacgattggcgaaaatatacagccccgctgagctcaatatcagcgtggtaatggcgaacaggtattccccttgtgcgtacattaaaacaacaaggtaacccaccagcaggccgagcagacctaacactgaccatttcagcgcgtcgctttgccaccaatgtttctttttaatgacatccatggggttcttcctcattccaggacggataaggctttcataccttatccgacaacaactgcctgatgcgacgctgacgcgtcttatcaggcctacatacgtttcaatttcgtaggccggataaggcgttcacgccgcatccggcatttcacagcattacttggtgatacgagtctgtgcatctttcagcgcagcatccacagtctgacgaccgctggcggcgttgatcaccgcagtacgcacggcataccagaaagcggacatctgcgggatgttcggcataatttcacctttctgagcgttatccatggtggcggcaatacgtggatctttcgcaagttcatcctgataggacttcagcgctactgcacccagcggtttgtctttattgaccgcttccagaccttcgtcagtcagcagatagttttcgaggaactctttcgccagctctttgttcggactggcggcgttaatacctgcgctcagcacgccaacgaacggtttagatggttgacctttgaaggtcggcagtaccgttacaccataattcactttactggtgtcgatgttggaccatgcccacgggccgttgatagtcatcgctgtttcgcctttattaaaggcagcttctgcgatggagtaatcggtgtctgcattcatgtgtttgtttttaatcagatcaaccaggaaggttagacccgctttcgcgccagcgttatccacgcctacgtctttaatgtcgtacttgccattttcatacttgaacgcataacccccgtcagccgcaattagcggccaggtgaagtatggttcttgcaggttgaacatcagcgcgctcttacctttcgctttcagttctttatccagcgccgggatctcttcccaggtttttggcgggttcggcagcagatctttgttataaatcagtgataacgcttcgacagcgatcgggtaagcaatcagcttgccgttgtaacgtacggcatcccaggtaaacggatacagcttgtcctggaacgctttgtccggggtgatttcagccaacaggccagattgagcgtaaccaccaaagcggtcgtgcgcccagaagataatgtcagggccatcgccagttgccgcaacctgagggaatttctcttccagtttatccggatgctcaacggtgactttaattccggtatctttctcgaatttcttaccgacttcagcgagaccgttatagcctttatcgccgttaatccagattaccagtttaccttcttcgattttggcgagagccgaggcggaaaacatcatcgtcgttaatgcggataatgcgaggatgcgtgcacctgtttttattttcataatctatggtccttgttggtgaagtgctcgtgaaaacacctaaacggactctagtttctttatacggcaacctctttccatcctccttgcccctacgccccatcgttgctttgtgtgatctctgttacagaattggcggtaatgtggagatgcgcacataaaatcgccatgatttttgcaagcaacatcacgaaattccttacatgacctcggtttagttcacagaagccgcgttctcatcctcccgcctcctcccccataaaaaagccagggggtggaggatttaagccatctcctgatgacgcatagtcagcccatcatgaatgttgctgtcgatgacaggttgttacaaagggagaagggcatggcgagcgtacagctgcaaaatgtaacgaaagcctggggcgaggtcgtggtatcgaaagatatcaatctcgatatccatgaaggtgaattcgtggtgtttgtcggaccgtctggctgcggtaaatcgactttactgcgcatgattgccgggcttgagacgatcaccagcggcgacctgttcatcggtgagaaacggatgaatgacactccgcctgcagaacgcggcgttggtatggtgtttcagtcttacgcgctctatccccacctgtcagtagcagaaaacatgtcatttggcctgaaactggctggcgcgaaaaaagaagtgattaaccagcgagttaaccaggttgcggaagtgctgcaactggcgcatttgctggatcgcaaaccgaaagcgctctccggtggtcagcgtcagcgtgtggcgattggccgtacgctggtggccgagccaagcgtatttttgctcgatgaaccgctctccaacctcgatgctgcactgcgtgtgcaaatgcgtatcgaaatctcccgtctgcataaacgcctgggccgcacaatgatttacgtcacccacgatcaggtcgaagcgatgacgctggccgacaaaatcgtggtgctggacgctggtcgcgtggcgcaggttgggaaaccgctggagctgtatcactatccggcagaccgttttgtcgccggatttatcggttcgccaaagatgaacttcctgccagtaaaagtgacctccaccgcaatcgatcaagtgcaggtggagctgccgatgccaaatcgtcagcaagtctggctacctgttgaaagccgtgatgtccaggtgggagccaatatgtcgctgggtattcgcccggaacatctactgccgagtgatatcgctgacgtcatccttgagggtgaagttcaggtcgtcgagcaactcggcaacgaaacccaaatccatatccagatcccttccattcgtcaaaacctggtgtaccgccagaacgacgtggtgttggtagaagaaggtgccacattcgctatcggcctgccgccagagcgttgccatctgttccgtgaggatggcactgcatgtcgtcgactgcataaggagccgggcgtttaagcaccccacaaaacacacaaagcctgtcacaggtgatgtgaaaaaagaaaagcaatgactcaggagatagaatgatgattactctgcgcaaacttcctctggcggttgccgtcgcagcgggcgtaatgtctgctcaggcaatggctgttgatttccacggctatgcacgttccggtattggctggacaggtagcggcggcgaacaacagtgtttccagactaccggtgctcaaagtaaataccgtcttggcaacgaatgtgaaacttatgctgaattaaaattgggtcaggaagtgtggaaagagggcgataagagcttctatttcgacactaacgtggcctattccgtcgcgcaacagaatgactgggaagctaccgatccggccttccgtgaagcaaacgtgcagggtaaaaacctgatcgaatggctgccaggctccaccatctgggcaggtaagcgcttctaccaacgtcatgacgttcatatgatcgacttctactactgggatatttctggtcctggtgccggtctggaaaacatcgatgttggcttcggtaaactctctctggcagcaacccgctcctctgaagcgggtggttcttcctctttcgccagcaacaatatttatgactataccaacgaaaccgcgaacgacgttttcgatgtgcgtttagcgcagatggaaatcaacccgggcggcacattagaactgggtgtcgactacggtcgtgccaacctgcgtgataactatcgtctggttgatggcgcatcgaaagacggctggttattcactgctgaacatactcagagtgtcctgaagggttttaacaagtttgttgttcagtacgctactgactcgatgacctcgcagggtaaaggtctgtcgcagggttctggcgtcgcgtttgataacgaaaaatttgcctacaatatcaataacaacggtcacatgctgcgtatcctcgaccacggtgcgatctccatgggcgacaactgggacatgatgtacgtgggtatgtaccaggatatcaactgggataacgacaacggcaccaagtggtggaccgtcggtattcgcccgatgtacaagtggacgccaatcatgagcaccgtgatggaaatcggctacgacaacgtcgaatcccagcgcaccggcgacaagaacaatcagtacaaaattacccttgcacaacaatggcaggctggcgacagcatctggtcacgcccggctattcgtgtcttcgcaacctacgccaagtgggatgagaaatggggttatgactacaccggtagctcttcaaccaacccatactacggcaaggctgtgtcggctgatttcaacggcggtagcttcggtcgtggcgacagcgacgagtggaccttcggtgcccagatggaaatctggtggtaatagcaaaacctgggccggataaggtgcttgcgccgcatccggcaaccaatgcctgatgcgacgctgttgcgtcttatcaggcctacaactgctgccgaaagtaggccggataaggcgtttacgccgcatccggcataaaaacagctttaaggggcgaaagcccctctgattatcgggtttagcgcgctattgcctggctaccgctgagctccagattttgaggtgaaaacaatgaaaatgaataaaagtctcatcgctctctgtttatcagcagggttgctggcaagcgcacctggaatcagccttgccgatgttaactacgtaccgcaaaacaccagcgacgcgccagccattccatctgccgcgctgcaacaactcacctggacaccggtcgatcaatctaaaacccagactactcaactgtcgaccggcggccaacaactgaatgtccctggcatcagtggtccggttgctgcgtacagcgtcccggcaaacattggtgaactgacactgacgctgaccagcgaagtgaacaaacaaaccagcgtatttgcgccgaatgtgctgattcttgatcagaacatgactccatcagccttcttccccagcagttatttcacctaccaggaacccggcgtgatgagtgcagatcggctggaaggcgttatgcgcctgacaccggcgttggggcagcaaaaactttatgttctggtctttaccacggaaaaagatctccagcagacgactcaactgctcgacccggctaaagcctatgccaaaggcgtcggtaactcgatcccggatattcccgatccggttgctcgtcataccaccgatggcttactgaaactgaaagtgaaaacgaactccagctccagcgtgttggtaggaccactatttggttcttccgctccagctccggttacggtaggcaacacggcggcaccagctgtggctgcacccgctccggcaccggtgaagaaaagcgagccgatgctcaacgacacggaaagttattttaataccgcgatcaaaaacgctgtcgcgaaaggtgatgttgataaggcgttaaaactgcttgatgaagctgaacgcctggggtcgacatctgcccgttccacctttatcagcagtgtaaaaggcaaggggtaattacgccccacagtgctgattttgcaacaactggtgcgtctcctggcgcacctttttttctcctcctgtactattgttgcgtttttgttgcgcattagttcacttaatttgctttacatctcccgtaaatatttttctgcgatacaatgcctttacgttatgtaacggagagttcggcatgtcacaccccgcgttaacgcaactgcgtgcgctgcgctattttacagagatccctgccctggagccgcaactgctcgactggctgttgctggaagattccatgacaaaacgttttgaacagcagggaaaaacggtgagcgtgacgatgatccgcgaagggtttgtcgagcagaatgaaatccccgaagaactgccactgctgccgaaagagtctcgttactggttacgtgaaattttgttatgtgccgatggtgaaccgtggcttgccggtcgtaccgtcgttcctgtgtcaacgttaagcgggccggagctggcgttacaaaaattaggtaaaacgccgttaggacgctatctgttcacatcatcgacattaacccgggactttattgagataggccgtgatgccggactgtgggggcgacgttcccgcctgcgattaagcggtaaaccgctgttgctaacagaactgtttttaccggcgtcaccgttgtactaagaggaaaaaaatatggagtggagtctgacgcagaataagctgctggcgtttcatcgcttaatgcgtacggataagccaattggcgcgttactgctgctctggccaacattatgggcgttgtgggtggcgacaccgggcgttccccagctctggatcctggcggtgtttgtcgcgggcgtctggctgatgcgcgctgctggttgcgtggtgaatgattatgctgaccgcaagtttgatggtcatgttaagcgcacggcgaaccgaccacttcccagcggcgcggtaacggagaaagaggcgcgcgcgctgtttgtagtgctggtactgatttcatttttactggtgctgacgctgaatacgatgactattctgttgtcgattgccgcgctggcgctggcgtgggtatacccgtttatgaagcggtatacccatctaccgcaagtggtgctgggcgcggcgtttggctggtcgattccaatggcttttgccgctgtgagtgagtcggtgccattgagttgctggttaatgttcctcgccaatattctctgggcggtggcttacgacacgcagtatgcgatggttgaccgcgatgatgatgtgaagattggcattaaatccaccgcaatcctgttcggccaatacgataaattgattattggtattttgcagattggcgtactagcgctgatggcgatcatcggtgagttaaatggcttaggctggggatattactggtcaattctggtagctggcgcgctgtttgtttatcaacaaaaactgattgccaaccgcgagcgtgaagcctgctttaaagcatttatgaataataactatgttggtctggtactgtttttagggctggcaatgagttactggcatttctgatgatgtaaaaaagccggatgatcatccggctttcttctgggttgcctgatgcgctgcgcttctcaggcctacacaacatatcgcaatttattgaatttgcagatcatggtaggccgaataaggcgtttgcgtcgcatccggcaattctcactgattacccttcgccctgcgtcgcactctcaatcgtcaaacgcacgtctgatgtaatcaactccgccagcaactgatacaccttcatcgtttctgccggttcggcgtcgccgctatcgctgatatacccttcatcacgcagtgtcagcaccagagaactgaacaccgccttgtcgaagaactccggcgcgttgataccgtgcagcacggagagacgttgcgcgacggtgcggctctctttctccagcgtaccgcggttgatcgacgggttggcactcaacagccagaaggtgatggcataacgttgcagcgtttcgcgcgcgcctgcggccagcagctgtagcgtgcgagaatgcgccgggttgatatgcaactcatcatcttgcagggtaatcagcccctgacgttgcatctcatttgccagcgcatcaataacgtccggtaactcgtcgcgatcccagcgcaggaacagctccgctttcagcattgggtaaagcacattgacgtgctccatcaatacgtcgcgggagatgtggcgatgctgggtgacaattgccgccatcagcgaaggcagcaccaacatatgtgcaatgttgttgcgatagtaggtcatcagcaccgcttgctcgcgcggcagaatgatgatgtcgccgatagtgtctttctcaacttcaaacttgttcatttgcagcgcgtgatcgataagctcgctggcgctggctgaaggaacggtagagtccgtggagtaaggtacgttgcgcatcagatccaggtagcagttgagttgctcggttaactgctcgcgggtgagtgagcgctgacgtgacgccagaagcgcagtacagcacaggttcatggcgtttgccgcgcctgcgttgttaatgcgtaccatcagatcggcagcaatattattgaccgtcggcgttaaccaggccggacgcaccgcttcgatgggatcgatagattcacgccagtctggtacgtgctggttaaggtaggtcatcaacggcattggttcaccgaagttgacgtaaccctgaccgagattacgcagcttgcttaaaccacgcagcatctgcggcaggctctctttctctttcgtcgcaccgcgcagttctttggcgtaagtacccacttccatgacgtgctcataaccgatatagatcggaatcagcgtaatcggacgagtgccgccacgcagcatcgcctgaatggtcatcgacagcgtaccggttttcggatccagcaaacgccccgtacgggaacgaccgccttccacgaaatactcgacggaataaccacggctgaacagttcgccgagatactcacggaaaacggtggaataaagtttattgcctttaaacgtacggcgaataaagaacgcccccagacggcggaaaatcggcccggccggccagaagttcaggttgatcccggcggcgatatgcggcggcaccagcccctggtgatacagcacgtaagaaagcagcaggtagtccatgtgactgcggtggcaaggcacatacactagctcatggccgtcgtgggccagctggcgaacgcgctcggcgttatggacgttgataccctggtaaagtcggttccaggtgaagcccagaatgcggtcagtcaggcggatcatctcgtaagagaaattcgccgcaatctcttccatcagcgcaatcgcgttctgctgcgctttttcatgggagatttttttgctgcgtgcttcatcttctaccgctttcgcaatggcgcgggaggcgagcagcttattaaacagatcctgacgagcaggcagacgtggacccacggcagccagacgttgacgggcaaagtgcatacgtgctacgcgcgccagtttctgagcgatagttttatccgtgccgtgttcatccgccatacggcgcagcgaaactgacggcgagaaacgcacaaaactgtcgcgaccgagccacagtacagcgaaaaatttctgtacgccgttaagcatacgcagcggcgggttcacttcgcctttttcacgccccggcgcgcgaccaaacatcaccgatacaggcaccatctgcacatccagatttgggttgctgcggtgcaaatcgagatagtcgtggaacagcttaatagactcttctttcggcgtgtaataggtgaacacacgcggcccgccgtgaatgaacacatagcgcggcagtagcgtgccgtcgatttccagcggctctaacgggtcaggcaggtcatgtgccagacactgggcgcgcaacgtcagcaagtcagctttcgagttgtacggcaaaacgtacataattggacgagaggtatccagccccagttccggggcaggatccgccggaatagacttgctttttaccaggatgcttaatggtaaattcagtaatttgtagtaaattcgtggccagccggacataaacgatgtaaagcctctggttaataatgcaaatgcgcggcaaggatagcagaaagtcatgggaaattctgtggtatccgctcatgtttcgcgcggcgttactcaaacccgaatcatcggatttaacggtacactgatattgacgctcataatgtaaaaaggttctttcaatggccaataataccactggattcacccgaattatcaaagctgctggctattcctggaaaggtttacgcgctgcatggatcaacgaagcggcattccgtcaggaaggtgtagcggtattgttagcggtggttatcgcctgctggctggatgtggacgcgattacccgcgtgctgcttatcagctccgtgatgctggtgatgattgtggaaattctcaatagcgccatcgaagctgtggttgaccgaattggctctgaataccatgagctttccggacgcgctaaagatatgggatctgccgcagtgctgattgccattatcgtcgccgtgattacctggtgcatcctgttatggtcgcattttggataacccttccagatttcgataaatctctggtttattgtgcagtttatggttccaaaatcgccttttgctgtatatactcacagcataactgtatatacacccagggggcggaatgaaagcgttaacggccaggcaacaagaggtgtttgatctcatccgtgatcacatcagccagacaggtatgccgccgacgcgtgcggaaatcgcgcagcgtttggggttccgttccccaaacgcggctgaagaacatctgaaggcgctggcacgcaaaggcgttattgaaattgtttccggcgcatcacgcgggattcgtttattgcaggaagaggaagaagggttgccgctggtaggtcgtgtggctgccggtgaaccgcttctggcgcaacagcatattgaaggtcattatcaggtcgatccttccttgttcaagccgaatgctgatttcctgctgcgtgtcagcgggatgtcgatgaaagatatcggcattatggatggcgatttgctggcagtgcataaaactcaggatgtacgtaacggtcaggtcgttgtcgcacgtattgatgacgaagttaccgttaaacgcctgaaaaaacagggcaataaagtcgaactgttgccagaaaacagcgagtttaaaccaattgtcgttgaccttcgtcagcagagcttcaccattgaggggctggcggttggggttattcgcaacggcgactggctgtaacatatctctgagaccgcgatgccgcctggcgtcgcggtttgtttttcatctctcttcatcaggcttgtctgcatggcattcctcacttcatctgataaagcactctggcatctcgccttacccatgattttctccaatatcaccgttccgttgctgggactggtcgatacggcggtaattggtcatcttgatagtccggtttatttgggcggcgtggcggttggtgcaacggcgaccagctttctctttatgttgttgctgtttttacgcatgagcaccaccgggctgactgcgcaggcttatggtgccaaaaatcctcaggcactagcccgtgcgctggtgcaaccgttgctgttggcgttgggggccggggcgttaattgcgctgctgcgtacgccgattatcgatctggcgctgcatattgttggcggtagtgaagcagtcctggaacaggcgcgacgctttcttgaaatccgctggttaagcgcaccggcgtcgctggcgaatctggtattacttggttggttactcggcgtgcaatatgcccgtgcgccagtaattttgttagtggtcggcaatatcctcaacattgtgctggatgtctggctggtgatggggctgcatatgaacgtgcagggcgcggctctggcgacggttattgcggaatatgcaacattgctgattggtctgctaatggtgcgtaaaattctcaaactacgcggaatctccggcgaaatgctgaaaacagcctggcgaggaaacttccgtcacttgctggcgcttaaccgcgatatcatgctgcgctcgctgttgctgcaactctgtttcggcgcgatcactgtacttggcgcgcgactggggagtgacattatcgctgttaacgcggttctgatgacgctactcacctttaccgcctatgcgctggatggttttgcctacgcggttgaagcacattccggtcaggcatacggtgcgcgcgacggtagtcaattgctggatgtctggcgggcagcgtgccgccagtcggggatcgtagcgttactgttttcggtggtttatttgctggcaggggaacacatcattgcgttgctgacgtcgttaacccagattcagcagctggctgaccgctatcttatctggcaggtgattttgccgttggtcggcgtctggtgttatctgctggacggcatgtttataggcgcaacgcgtgccgccgaaatgcgtaacagtatggcggtggccgccgcaggttttgcgctgacgctccttacgctgccgtggctggggaatcatggtttgtggctggcgttaaccgtctttctggcgttacgtgggctttctctggcggctatctggcggcgtcactggcgtaacgatacctggtttgtcgcaacgtgacggttaaaaattctgaataaataatcctaagccaaattgctgactacacttaatctcacgttcagaagaaaagtgaacgtactctcattcacaacctaacgatgaggtcttgattatgaataaagatgaagccggcggtaactggaaacagtttaaaggtaaagtgaaagagcaatggggcaaactgaccgatgatgatatgacgatcattgaaggaaaacgtgatcagttagtgggtaaaatccaggaacgctacggttatcagaaagatcaggcagaaaaagaggttgatagttgggaaaaacgccatgattaccgctggtaattaatccctcctgcccgacatgtacaaggatgtacacccttttagcgaggtttctttttcacctgaatagagtggtcatgatggcactgttcaggatgacgacacgcttctacttctacacatgctgaacataatccatgtgcttcaataacattatgccgcagggcaaaacccatttttgccgccagcgtatgcatgatgtcttccacgccttcagcacattcttctttcaccgcgccgcagcgatcgcaaataaacatggctgaagtatgggtgggctgatcgaacagatgacagagcacataactgttggtggattccaccttatgcacaaaaccttgttcaagcagaaactccagcgcgcgataaaccgttggcggcttggcttgcggttcagcttcgcgcagcaaatcaagcagatcataagcgctgatagcgccatcctgcagactcatcaggcgcaacacttcgaggcgctgtggggtcaggcgcacattacgctgtgcgcagattttttcagcctgcgctaataactcctgcgttgtggtcttttccattgggcacctcgacagtggggttaagaatgtccttactttatcatagttctcacttaaacgccgagaacagggtgtcatggctgtcacattgcctgatcgcatattcgttatgctatagtagcgcccccaatttaccagatgcttaaaaagtcgccatgccagcagaatcacacactgtttatcccgcttaccgtttctcgattgccccgatgcttgactggacggacagacattgccgttatttcctgcgtctgctttcccgcaatacgttgctgtataccgaaatggtgaccacaggggcgattattcacggtaaaggtgattacctggcgtacagtgaagaagaacatccggtagcgttgcaactcgggggtagcgatccggcggcgctggcacagtgtgcgaagctggcagaagcgcgcggatatgatgagatcaacctgaatgtcggctgcccgtctgaccgggtgcagaacggcatgtttggtgcgtgtctgatgggtaatgcgcagctggttgccgactgcgtgaaagcgatgcgcgatgtggtgtcgattccggtgacggtgaaaacgcgtattggcatcgatgatcaggacagctatgaatttctctgcgatttcatcaacaccgtttccggcaaaggtgagtgtgagatgttcatcatccacgcacgtaaagcctggctttctgggttaagtccgaaagaaaaccgtgagatcccgccgctcgattatccgcgtgtgtatcaactgaagcgtgactttccgcatctgacgatgtcgattaacggtggtatcaagtcgctggaagaagctaaagcgcatttgcaacatatggatggcgtgatggtcgggcgcgaggcgtatcagaatccggggattctggcggcggtagaccgagagatttttggttcctcggataccgatgccgatccggtggcggtagtgcgcgccatgtatccgtacattgagcgtgaactcagccagggtacgtatctcggccatattacccggcatatgctgggcttgttccagggtattcctggcgcgcggcagtggcggcgttatttaagtgaaaatgcccataaagcgggtgcagacattaatgtgctggaacacgcgctcaaactggtggcggataagcgttaacttttcaccaaaaagtagtcaaattcaccacgccctgcgcaccgtcgcggggtgttttgctgttaaatcaacagattatttttggcatgattcttgtaatgccagcaagagatttcatatttgggagagcatcatgctggaactactttttgtaattggcttttttgtcatgctgatggtcaccggtgtttcgttgctgggtattatcgccgcgctgattgtggcgacggcctttatgttcctcggcggtatgctggcattgatgattaagttgctgccgtggctgctgttggcggttgcggtggtgtgggtgatcagggcaattaaagcaccaaaagtgccgaaatatcagcgttatgaccgctggcgttactaagggattgtgcggatgatcacaacctaaggttttatccttagaacaaaataggaattgataatcaaatctgtcactattgcgcgtcaaacaaattcatcgagctgtaccctacatacagccgaactataaaagaaagggcttcccaggtggaagcccaatttcttttatggaatcaacaggctggaaccctgcgtcgcccggctttccagaatctcatgcgcacgccgcgcatccttcagcggatatttctgctgctcggcgacatcgaccttaatcacaccgctggcaatcaaagagaacagttcattactggcctcggttaattcctcccgcgtggtgatatagccttgcagggaagggcgtgtcacatacaacgagcctttctgattgagaatgcctaagttcacaccggtaaccgcacctgatgagttgccaaaactcaccattaagccgcggcgttgcaggcaatccagcgaccgttcccaggtgtctctgcccactgaatcgtacaccacgcgcactttcttaccaccggtgatctctttcaatcgctcgaccaggttttcttcgcgatagttaataacctgccatgctccggcttttaaggcgctttgcgctttttgcgccgttcctacggtgccgataagtttcgcgccaagggcttttgcccactggcaggcaatcaagccaacgccgccagccgctgcgtggaacaggaattgttcatcgggtttaatttcataggttttgcgcagcagataataaaccgttaagcctttcaggaaggatgccgcagcttgctcaaaagaaattgccgcaggcagaatcgccgctttatccgcattaatgttatgcacagagctgtaagcgcctaatgccgattgtgcatagactacgcgatcgcctgccttaatatgctttacaccactgccgactttactcacgatgcctgccgcttcggtgcctaatccgctgggtagcgatggtggcgggtaaaggccgctgcggatatacgtgtcgataaaattgatgccgatggctttattttcgacctggatttcattctccgccggatcggcaggagtgaactctacggcttgaagtacttccgggccaccgtgcttgtgaaattcaattcgtgttgccatttaaactcctttactgagcgacatatctgttttaagcctaacagtagtcgccaggccgcgcggggattttttccgggctgcggtcacaacccggaatatctctgatcagtattgaaacggcgtcgccgcaatccagttttgccactggcgctcaaagttggttagcgttaatacgccccgttcacggcacgggcgagtccaggtttggtaatcattagcttcccgacaaacacaaatcatatattgcctggcatcctgattttctggccgaaaacgccaggccaggagtggcccacctggtgtttgcggtgcaataccggcttcgccatcatagatagccctggcaccacgactcccaccaccgttttcgacataacattgtaaagaacgcagtacagccagcgccagttgcgcactttgccgccactggaaagattgtgccaggctgttttcatcgcattgaataccttcccggcgaatatcttcacaaagtgttgccagggtttgcgcggcagtgttgatcccctgtgtatgacacaaaattgcggcatggtggctcatggtattttgtatcgtttctcgcacgtcgtcacgtagcagcccctgattcaggtgctgttgcgcctcattaatcgtactgagaatttgttgcctctcgagaggccggtcctggcttttctgatgagcaatatgtaatgcacagcggcgggcgaaaacttgcccggcattgagcgctgctccacctgggcgcgtgacaccatgtgttccggcattttctccggcagcataacaaccagttagcgatgtacgtgcccaaatatcaacttcaattccgccattaagatgttgattatttagcgtaaacttgagcggtgaggctgtgagatcatgaccgtgcatctgatacaaacgaatagccagaggattcatctgtgttaatctcgccagcggttgtgccagcagggcgtgattttgttgcagatagtcgatgacatcatcatccagctcccgcaggttaaatagtgttccgtccgctgcgggttctggttcccgtagaaaatcgagaaaaacatcgcgccctttttgagtctcttcataaactgcgacatccagcaagctggagccatattccagcattcgttccgcgtgaaacggccactggtaacctttgcgaaatatcgcggaggccagcatacgagtcgtggggtaataagttgccagaaaattatactgacgcccggagtggtcctgcgaatagatgcgcggcatcgcctgcatgtaagtaccggaaagattccacggaaactggctgcgcggtgtaccgataccaaactgactttccgtaagattaaccagagttatccctgcttccagcgccatgcccaacgcactaaaacagttcaccggataaacactgtcacgataaagttcaccaggcccgcccgtggctaaaaccagatgctgacagcgaatcactaccattctccagggattatcccgacaggctttatcgatggcgatcaccccctcgactcgtcgattttctccttcaccactggtcaggatacgaatcgccgttgtgtgatcgcaaagaggaatattaaggcgcattgcctcctgggccagcaccttcaccatcaggcgcgatgttcgaggaccgcagctagtggcacggccaaattcatcgtgatcggtttgataacgcaacgttgcgccaaagagatcttcaggcaaatccagacccagatatttcagtacttcacaggtgttcaccgatccgagcgcctcaacatatgcggtgtcatgatccatcgcaccacctgccgccagggtgttacttaatgtcagaaaatggtcaccatttgcacgcgtattcgcggtgtgaagcgtttgtttatcagaaccagaacaggcggaagttccccagaaggctttgctggaggctaccattacatcgacattttgccgtttcagctcgacggcagctcgccatcctgccgcgccactgcccagaaccagcgtgttgcagcggtactcaggtaaaatggtaccgttaaggtcgatactaccgctgacttgagccagcggtgcgtaatggggcattttcacgtcagtcagggaatcgataatagattcagagacattatgcgtcatggtaggtgcccgtagtctggttatgttgggaaacgctgatcgtttcagcgtcggcaagatcatcaagatcacgatcgcgtgtttctggagcaaagaaagtcgcaataatcgtaccaacggtcagcagactaaggtaaatagcgattggcatccaggcagcaataccactgggatcgttagtgtggatcacccaggaaatgattgcagaaccaaccagtggcgcgatccctccggcaataacggcagaaacttcccttgccagtgcgacgccaatataacgatggcgagcaccaaagagttcaggcagaaaagcaccttgtgcaccaaacataccccaggctccaatccctaaggccagagaaagagagacaatagtgacaggaacattaccgtggctgaaagaccaccacaccggaaaggtaatcaacaactgaaaaatcgccagactacgatagacaagaaccctgccgaagcgatcggtcagccaaccggcaataggcaccataattgcaccgactactaccgcagacatcaggcatagcgtaccaactgatttgtccagcccaaccacaccaacgatataactgatcgctaaagcctgataaatcgacgagccgccgttttctgccagacgtaagccaatcccgacgaagacattacggcgtgatgttttcagcaaatttcgtaagggtgattctgtaacttgttgacgagcttcgagttttgcgaatgatggcgattctttaagatgcagtcgaatataaatagccaccgcgataatcaccacgctggagaggaagggcaagcgccaccaccaggtttcggcaagatttgtcacattatgcagcaggatgaagtaaacggcagatgccataaacgtaccaatctggattccgaggaacggcagcgcggcgtaataaccccgtttgccgtcaggagcatattcggtcatcagtacggcggctcccgcctgttcagccccagcaccaagcccttgcagcaggcgtaatgcaataagcataattggcgcccagattcccgctgtttcgtaagtgggtaataccccgatcaacgtgctggcgattcccattaacaacaccgttgctaacaggacgaacttacggcccaaacgatcacctaatgagccgaagagaattccgcctacaggtctgacggcaaatccgagaaagtaggtgccaaaactggcgatcagcgccattcccggttcctgattaggaaaaaagagtggaccaaaaataatggcggatgccaggctgtaaagtgcgaaatcgtagtattccagtgcgctgccgagagagcaggtccacgccgcgcgacgcagatctgccgatgaaacattcgctttctctgctggttgtgaaggttgcatgatgtgtctcctttcagacggataaaagaaatccgcctaaaatcaatgggattcttgcgttattattaaaatccaaaatgaaatgctaagttatcgagcactaaagtgcggttgacgcttctcagtaaatgcctgactgccttcatgagcatcttcagtcgtggcggaaaaagcgccagccagtgcttcaagcgtcgaggccacagcaataccttctccggcatcaataacctgcttggcgatctgcactgcaacgggagcacgctgggcgatacgttgtgccagttgcagtccggcgtcgtgtaacgtctccctggcgacaacgcgattcaccagcccgcaggacagtgcccgctgtgcatccagtggttcaccggtaaataccagttctttcaccagtgagcgcccaagcagtgccgtcagccgctgcgttcctgaccagccaggcactgtcgccagcccggtttctggtagtgccatttgtgcttcggcgctacaaatacggatatcggcggtagcagccagttccagaccaccgccataagccaggccgtgcaacagggcgattacgggctgtggcagttgtgccagagcatcaaatgcctgatgaccgcggcggatccagttgcgccacatatcgagtgcagaaagagaggtccagcgatgaatatccgcgccgacacaaaacgctttttcactggcactggtcagcagtactacgcggatctccgaatcagtttccaacgtgtggcaatgcgccagcagttgttcgagcatctctggggttaatgcgttgagtttcgccgggcgattaatcaccaaagtggcaatgaaaccgttgcgctggaggtcaatggtgccgttattcatggtgacgtccttgttgaaaatagtggggattcattagtttgagatcgtctgccagacggagtggggcatcgctttgggcgagaatgtcgcgttcaggatcaatacctggggcaatttccgtgaccagtagtccgtctggggttaattccagcacgcagcgttcagtgatgtactgcacttgttgcccgagtcttattgcgcgtttgccggagaacgtcacgtgggcgacgtcctgtaccagttttttggctttgccttctttaatgatacgcagctgaccttcttccagttgcagttgggcaccggcattgaaaaagccagagaaaataatgcgcttcgcatgtgaggtgatatcaataaatccaccgcatccggcagtgacatgtggacgagcggggagatgtgagacgttcactgagccatctgcgccgatttgtaaaaacgacatcagagtgagatcaaagccaccgccctggaaataggtgaactgctggggagagggcaaaaatgcttctgcattagaggcacaaccgaactgaaattccagcagtggaactccgccaatcgcgccctgttccagcagccaggtgacgtcaccgtggcgaccttgttccagtagaatgcgtggtacgttggcagaaataccaaagccaatatttaccgcatctccactttgtagttcttgcgcgactcgctgggcaataactcgcgccgggccatgttccatataacgaaaggctgatagcggacgactgatttcgccggaaatggcaggttcatattgcgtttgtgtcgtttgtgtttgttccggcgcaatcacgatgtaatccaccagtacacccggaatacgcacctcttttggtttcagacttccggcggcaacctgtcgttttacttgcgcaattatgatgccaccattattgcgaacggcagtagcctgttccagtggccccagataagccccttcatgttcataagtcaggttgccgcgttcatcggcagtggtagcgcgaatgatcgccacctgcggcacgatactggggaaaaacagccagtcgtcgttagcaaatcgaacacgttcaaccagagattgttgcgccgctttttcattcattgcaccgccctgcaacaggggatccacataggtatccatgcctgtttgtgtcagcacgccaggacgatgagccgccgcttcccggtgcatatcaaataagatcccggaaggcagattccaggcggggatcgcgttgtcattgatcatttgccagattaacggaggtgccattgatgatggaccggaggggtaggagccagcgatcacttttgccagtaagcccggttgcgccagatgatcgatgccttttacgccatacatatcaccagcggcgatagggtggatggaggtgatgttttgcggatgtccggcacgttgaaagcgttcacctattgctgccagcaccgcatccggacaccccattccactggaggaggagacggtgacaactgcgccatcaacaatcaaatctgcagcttccggtgcagtgatcgtgcgtacagagcacataataatttccttgtttcgatataaaaataattaaaaatatgcatttaaaacaatatgataattttcataaattaattggaacgatctagtttatgcgtaatttgtacgattagggtgtaaaaaacacaacaagggaagtgcgaatctgtgatcgaaacgacgatctcctgcgatcccttgcgttaacggatcgcatgagtaaaaggagattatgataaagtaattgccttgatcttatggggggttggagcaggcatggcgaagtcggatacaggaagaaagcgggtaacattaaccgatgttgcgcgtgcggctggcgtttcgaaatcgaccgtatcgctggttctcaacgacagttcacttatcaaaaaagagactcaacaaaaagtccagcaagccattgaacaattaggctatgtctataaccgttttgctgccaatctgcgttcgcaaaaatcgctaactatcggcgtagtcattgacgatttgataaatcctttcttcgctgaatttactatgggtcttgagatgacgctggcggagcacggttttatcaccgtgatgtccaatacctcccagcgtagtgaccggcaaaaacaggtgcttgataccttgctggaacaccacgtcgcgggcattgtcctctgtccagtgaacagtacctcagaagccgatttacagcgttatgccaacagttccacacccttattaatcacgatgcgtcctctggattggcaacaattgcccgtcgattacgttggcgtggacagccacgcaggtgtacgggaagcgacggaatatctcattcaacaagggcacagagatatcgtgtttattggtggtcttacgcaccatatgcgttatcagggataccttgaggcgatgaatcaccatggtttacagccgtggagtactgatgctttttcgctgcgtgctgaaccgactcaggccaacggctaccagttgatgcaacagctgttggatatgccttcgccacccacagcggtgatttgttataacgatttaatggcttttggcgcggagtcggcactaggcgaaagaggattatttgccggggaagatatttcgttgattggtaatgatggcgtggcggcttgtgcttacagtaacccgccgttaaccacaattgcggtagaaccattggctctggggaaacaggcggcgcagcaaattttacggcgtattgcgcaaccagacgcaccgctcagccattacatctatcgcccgaccctgcaaattcgcgcttccaccggaaagcgggggcgttaaatgctgtagcgagaaactgtttctcgctatactctcttgtcccccattcaacagcaggtaacaccattcgttatggcaggcaatagacctttcaacaaacaacagactgataaccgcgaacgcgatccacaagttgccgggctaaaagtgcctccgcactcgatcgaagcggagcagtcggtgttgggcggtttaatgctggataacgaacgctgggatgatgtagccgagcgtgtggtggcagacgatttttacacccgcccacaccgtcatatctttactgaaatggcgcgtttgcaggaaagcggtagtcctatcgatctgattacccttgcggaatcgctggaacgccaggggcaactcgatagcgtcggtggttttgcttatctggcagagctgtcaaaaaatacgccaagtgcggcgaacatcagtgcatatgcggatatcgtgcgcgaacgtgccgttgttcgtgagatgatctccgttgctaacgagattgccgaagctggttttgatccacaagggcgtaccagtgaagatctgctcgaccttgctgaatcccgcgtctttaaaattgccgaaagtcgtgcaaacaaagacgaagggccgaagaacatcgccgatgtgctcgacgcaaccgtggcgcgtattgagcagttgtttcagcagccacacgatggcgttaccggggtaaataccggttatgacgatctcaacaaaaaaaccgctggcttgcagccgtcggatttgatcatcgtcgccgcgcgtccgtcgatgggtaaaacaacatttgcgatgaatctcgtcgaaaacgcagcgatgttgcaggataaaccggtgcttatcttttcgctggagatgccatcagaacagattatgatgcgttctctggcgtcgctgtcgcgcgttgaccagactaaaatccgtaccgggcagctcgatgatgaagactgggcacgcatttccggcaccatgggtattttgctcgaaaaacgcaatatctatatcgatgattcctccggcttgacgccaacggaggtgcgttcccgcgcacgccgtattgcccgtgaacacggcggcatcgggcttatcatgatcgactacctgcaactgatgcgcgtaccggcgctttccgataaccgtacgctggaaattgcagaaatctcccgctcgctgaaagcactggcgaaagaactgaacgtgccggtggtggcgctgtcccagttgaaccgttctctggaacaacgtgccgacaaacgcccggtcaactccgacctgcgtgaatctggctctatcgagcaggatgcggacttgatcatgtttatctatcgtgatgaggtgtatcacgaaaacagtgatttaaaaggcatcgcggaaattattatcggtaaacaacgtaacggcccaatcgggacggtacgcctgacctttaacggtcaatggtcgcgcttcgacaactatgcggggccgcagtacgacgacgaataatcactttggggccagctaaacactggtcccaaaattattctgccgggctttcaatccctttttttagccactctttaaggctcagaaccgagttatcttcgtcttcgtggaatatgatattgtcgatctgccaacagccatcatcagcggaacgcgccattagcgcttcgtcctgccaggcctttttatcatcaacgctaaaatgaaaatggagggtgacagtgacgttgttatcaccaggtttaaacgatgacggtagcgtcacgccatcaaatttctcatagtaactatccgaaggataagacgtgaaaataatcccgtcaccaaaagtaggtttggccgtgggatcaatggcgtagtcgcgtttatttctgtcatacgcgccaacaataagttgataaagcgagggggtgaggtaattctgaaaaaatgccagctggtctttttcactcttaaagccggtatcagaaaaaacataggttgaataaaacttatctgcgacaccgtcaggtgtctgcaccgggcaagcccccgtcgcggcaggtgttatacctgcgattagcagaaaaaagaaaacaaattttatctttgtcatggctgaaaatccgatatcatcttgccgtttataaacccatccctggatgtggaatagcatactccggtcatatctgtttagcgaggttttgcactggtgggcagaacctgaaaaaaaggaatacaaatgcaagcggcaactgttttgattaaccgccgcgctctgcgacacaacctgcaacgtctgcgtgaactggcccccgccagtaaactggttgcggtggtgaaagcgaacgcctacggtcacggtctgattgagaccgcgcgaacgctccccgatgctgacgcctttggcgttgcccgtctcgaagaagccctacggctgcgggcggggggtatcacgcgacctattttgttactggaaggtttttttgaagcagacgatttgccgacgatctccgctgaacatctgcataccgcagtccacaatgaagagcagcttgtcgccctcgaaaacgctgaacttaaagagcctgtcaccgtctggatgaagctcgataccggaatgcaccgtttgggcgtattgccggaacaggccgaggcgttttatcagcgtctgagccagtgtaaaaatgtccgccagccggtgaacattgttagtcacttcgcccgtgccgatgaaccgcaaagcggcgcgactgaaaagcagctcgatatcttcaacaccttttgtgaaggtaaaccggggcaacgctcaattgcggcatcaggcggcattttgttatggccgcagtcgcattttgactgggcgcgtccggggatcattctttacggtgtctcgccgctggaagatggcacgacaggggctgattttggctgtcagccagtcatgtctttaacctccagcctgattgccgtgcgtgagcataaagccggagagcctgtcggttatggtggaacctgggtaagcgaacgtgatactcgtcttggcgtagtcgcgatgggctatggcgatggttatccgcgcgccgcgccgtccggtacgccagtgctggtgaacggtcgcgaagtgccgattgtcgggcgagtcgcgatggatatgatctgcgtagacttaggtccacaggcgcaggacaaagccggggacccggtcattttatggggcgaaggtttgcccgtagaacgtatcgctgaaatgacgaaagtaagcgcttacgaacttattacgcgcctgacttcaagagtcgcgatgaaatacgtggattaatattcgtctccagggagggacaatgtcttattcagaaatcgccgcgtgtctggcatacgcggtttccgtctggctggctgccagaaacaatgtgcatacatggtggatcggcataattggcagcatattgtacggctgggttttttggtccgtgcaactctatgccgacgttacgctccagttattcttcatcgcgaccagcatcactggctggatccactggctgaaaggtcagggtggcgacatcttgccggtgcgccgaacgcaagccagtcactttttccttttgttgctctgtgctgtcgtcgtggcaggcggttacggctttttactccacacctttaccaatgcctgggcaccctggctggattcgttgattttgacctttagcgttctggcacaattcatgttgatgggaagacgtatcgaaaactggttcgtctggttagcggtgaataccctggcagtgccactgtatatgacgcgcggtttaaacctgaccgctggcttatatttcctgttctggattaacgcctggcatggtttgtatcaatggcgcaaagagttgcaaacatcatgaagccttttgcaacgggcctggtggttggtaaattcgcgcctttgcattgtggtcatgaaaagttgatcaataccgcactggcgcaatgtgaagaactgttcatcatcagttattccgtgccggaaatgcctgactgtgaacctgaaaagcgcctgacgtggctgcaagtgcgcttcccgcaagcgacgattttggtactgacgccagagcttgttgcgcgttataacttacctgccataccgcataacgatgccgatgccgacatccaccgtcattatgtggcgacgctgtgcctgcagatattacgctgtcgtccacatgctgtatttactgcagaagactatggcgatggctttgctaacgtgctggcgcggcgttttgcccaacccgttgaacacgttcgaatggcgcgcccagttggcgatgaagcgccttcgggaacgcttattcgttccgatgttcaccgctatcgctacatgttggcgaatgatgtttattacagtttcgttcgccgtatctgtctgcttggtggcgaatctaccggtaaaagcacgctttcaaaagcgctggcggatgggcttgatacggtgtatgtcgctgaatttggccgcgactattgggaagaaaaaaacggaatcttaaccgcggatgatttgttgcatatcgcctgcgaacaggtacgccgggaacaacaagcagaagctaatcactatcttatatgtgacacgtcgccactcacgaccttgttctatgcccttgatcaatatggtcatgctccgcaagaacttcatcaactggcggagcgggaatactctctggtggtgctttgcggcgcagaatttcccttcgtgcaggatggtacccggcaaggagaggtatttcgcgcacggcaacaggtgtggtatgaacaggaattgtcgcgcaggaacattccttatctttcggtttcggggccactgcaagagcgagtggagcaaattcttcgccaacttcccgactgactttgaacatcctctcgatcttcgcctacttccggtttattgtgttttaaccaccagcccgtaaacctggagaaccatcgcgtgtttcaaaaagttgacgcctacgctggcgacccgattcttacgcttatggagcgttttaaagaagaccctcgcagcgacaaagtgaatttaagtatcggtctgtactacaacgaagacggaattattccacaactgaaagccgtggcggatgcggaagcgcgcctgaatgcgcagcctcatggtgcttcgctttatttaccgatggaagggcttaacagctatcgccatgccattgcgccgctgctgtttggtgcggaccatccggtactgcaacaacagcgcgtagcaaccattcaaacccttggcggctcaggggcattgaaagtgggtgcagatttcctgaaacgctacttcccggaatcaggcgtctgggtcagcgatcctacctgggaaaaccacgtagcaatattcgccggggctggattcgaagtgagcacttacccctggtatgacgaagcgactaacggcgtgcgctttaatgacctgttggcgacgctgaaaacattacctgcccgcagtattgtgttgctgcatccatgttgccacaacccaacgggtgccgatctcactaatgaccagtgggattccgtgattgaaattctcaaagcccgcgagcttattccattcctcgatattgcctatcaaggatttggtgccggtatggaagaggatgcctacgccattcgcgccattgccagcgctggattacccgctctggtgagcaattcgttctcgaaaattttctccctttacggcgagcgcgtcggcggactttctgttctgtgtgaagatgccgaagccgcaggccgcgtactggggcaattgaaagcaaccgttcgccgcaactactccagcccgccgaattttggtgcgaaggtggtggctgcggtgctgaatgacgaggcattgaaagccagctggctggcggaagtagaagagatgcgaactcgcattctggcaatgcgtcaggaactggtgaaggtattgagcacagagatgccagagcgcaatttcgattatctgcttaatcagcgcggcatgttcagttataccggtttaagaaccgctcaggttgaccgactacgtgaagaatttggtgtctatctcatcgccagcggtcgcatgtgtgtcgccgggcttaacgcgcaaaatgtgcatcgcgtggcaaaggcgtttgctgcggtgatgtgattttaatcaacaggcggatctctccgcctgttcctgactccagccatcccctactattctgtcccttttttcgcccacttttacatcatctcttttctataagtttttgaaaattagtgtttttaactgttggtacggattgtgcagtaatgcggctgtctatgaccatcaggagaaaaacatggagaacatgacctcgcccggcacgctgcttagtggagataacgcgacctggcttgaagagtactaccagacctggttgcgtacgccggaacaactcccggaagactggcggcgtttttttctttcacctgaactgactgtccaaagcgtatccggtgataacaacgtcagcggtgcgacgttaaaaaaacaggctgcggtaatacaactgatcaatgcctggcgcacgcaggggcatctgcgcgcaaagcttgatccacttggtttgaatcccccggctgacgttccctccctccagcctggtttttggggattaagcgaagaagacttgttgcaggaatttagcgtcacctttggcgcacacaccacgcaaatgccacttaagcaactgcttaacctgctggagcaagcctgggcgggtagccaggcttatgaacttgctcatctggaaaatcgtgaagaaatcaactggttgttatcacggattgagagcagcaatgcgccacaagcagatgtacaaacctgtattgctcgttttgaaaaactgatggcggcagagacgttagagcgttatctgcatacccgttatgttgggcagaaacggttttctctggaagggggcgaaagtgcaatcccggcgctcgatacgctgacaaaacgcctgcgtgcgcaaggtgtggaggaaatggtcattggcatggcgcaccggggaagacttaatgttctggttaatctgttgaataaagacccggcacagctttttgctgagtttgaaggcaagcagacgatcggcagtggttcaggcgatgtgaaataccacatggggtattccagcaatctggaaacacctgccggttcgctgcatgtggcgctggcgtataacccctcacatctggagatcgtgaatccggtggtgctgggccaggtgcgagccaggcaggaacgccgtggtgaggatggtcaggcaaaagtggtgggcgtacttattcatggggattccgcgttgggcggcctcggcgtcaaccaaaccacgtttaacttatcgcagactcagggctacggcactggcggtacgctacatctggtgattaacaatcagattggcttcaccacttcccgcttgcaggatatgcgttcttcacggtactgcaccgatattgccaaaatggtagcggccccaattatccacgttaatggcgatgacgttgacgctgtttgccaggtaatggaactggcgtgcgaatggcgagacaccttccggcgcgacatcatcatcgatatttgctgcttccgtaagcacggacacaacgaaagcgatgagccacgtcttacccagccacaaatgtatcaggcagtggatgctcaccctggtacgctcgcccgttatggtgaatctcttgcccgccgcggcctgttaactcaggcgcaacaagatgagatgacggcacgctatcgcgactggctggatagctgccagaaacgtgaaccgcagcctctcaaacctgcaattcactcttttagcgctaactggtatgggttgaccaaccctcactggagcgccccggtatctacggcattgcctcggcaaaagctggcagcgtatggtgaaatcatttctacactgccacccgatgtggtcgcacatcctaccattaaacggcaactggcgttacgccaggatatggccgcaggtactcagccaatagactggggaatggctgaaatgctggcctatgcatcgcttgtggatgcgggtgttggtgtgcgtctttctggtgaagactcagggcgtggcacgttcagtcatcgccatgcagtggtacatcatcaaactgaagcccgtcgttatctgccgttacagcatatccgcgctggtcaggcatctttcgatgtttatgattcggtgcttaatgaagaagcgctcttagcctttgaatatggctattcaacgtctgcgcctcagcaactggttatttgggaagcacagtttggtgactttgccaacggcgctcaggttgctattgaccagtttatctcgtctggcgaaaccaagtgggatcgctatagcggtttaaccattcttctgccgcatggctatgacggacaagggccggagcactcttctgcgcgtcctgagcgctggctgcaactgtgcgcagaaaacaacatgcaggtggtgatgcccagtgagtcagcacaaatgttccatttgttgcgcggtcaggcattacgcccaatgcgcaaaccgttagtgataatgatgagtaagcgtttacttcggtttaaaggcgctatgagcgagctttgtgaattcactgatggcgcttataaaccggtaatcaccgatccgcaattgcatcagtcccagaaagttaagcgcgttattttgtgtagcggccaggtctattacgacgtactggaagcccgtaagcagcgtgagcatgaagacgaagtggcgattgttcgcctggagcaactctacccgttcccggtcgcagaactgaatgatgttctggcgagttggccgaactgctgcgaatggatttggttgcaggaagagccagaaaaccagggcgcgtggcggcagattcgtcatgagctggcggcactgaaaattaacactccttactggcagtatgcaggccgcccggcagcggcagctccggcgacagggtatgggcgtgtacataaacaacaaatcgacgaatttcttgctgctgcgtttgcagatattcagccatgaaaggcgcacaaaaataataaggagaacattttatgatcgaaattactgtccctgtattaccggaatctgtcacggaaggcacgctgacaacctggtgtaaacaagaaggcgagcacgtaaaacgcgatgatgtgattgccgagctggaaaccgataaagtcattctggaaataccggccccgcacgatggcgtgttaagcaatattatcgtcagcgaaggtagcacggtcacgtccgcgcaactgttggcgcatcttaagccgcaagctgtcatagaagaaaccgtcacaccagtcaccgaaaccctggcgatgccttccgcacggctggaggcacagcgtagtggtgtcgaacttgctgacgttgcggggagcgggagaaatggacgtatcctgaaagaggatgtacagcgcgttactcctgcaccagtcattcagcctgaacgggtggcggagatcgcgccagctaaacccttgacaccgggtgctcgtcaggaacgtcgtgagccgatgtcgcgcttacgtcagcggattgctgagcgtctgctggcttcccaacaaaataacgccattcttaccacattcaacgaagtaaacatgcagagcgtgatggatttacgcgcccgctggaaagatcgttttgccgagaagcacggcgtgaagctgggctttatgtccttctttgttaaggccgttacccgggcgctggagcgcttccctgtagtgaatgccagcgttgatggcaacgagattatctggcgtgattattgcgatatcggcattgcagtgagcagcaaccgcggcctggtagtgcctgtgttacgcaatgcgcaatcactctctttggtggaaattgaacggcaaattgccgaatacgccacacaggcacgcaatggcaaattgccgctggaggcgttacagggcggcacgttctctatcaccaacggcggtacttttggttcgatgatgtcaacgccaatcattaacccgccgcagtcggccattcttgggatgcatgccatcacgccgcgcccggtcgcagaaaacggccaggttgttattcgtcccatgatgtaccttgctctcagctatgaccatcgcattatcgatggtcaggaagccgtgcagacattggtggcaatacgtgagctactggaatcaccggaacaactgttgctggatctttaaggagggcgccgatgagtacaatttttgatgtggcagttatggggggggggccaggtggttacgtagcggcactgcgggctgcgcagaatgggctttccgtagtatgtattgatgatggtgttaatgcacagggcgaaccttcgccgggcggtacgtgtctcaatgtcggctgtattccgtcaaaatcgttgctgcaatcttccgaactgtacgcgcaagtgcagcatgaggcgagcattcatggcgttaatgttgacggcgtatctttcaatgcagctgcgatgattcaacgtaaagacgccatagtaagccgcctgacaatgggcatcggcttgctgtttaagaaaaataaagtgaagtacctgtgcggcctcgcaacgttagaacatgctcgggatgagatttggcaattacgtgtaaacgatcaacaaatccgcgcccgtaatgtggtgattgcaacaggttctcagccgcgtcaactgcctggcgttaccattgataatcagcaaattctcgataatcgcggcgccctggcgttaaccgctgtgccgccgcgtctcggtgtgatcggcgctggcgtgattggccttgaactggggtctgtgtggaatcgggtcggttcagacgtcacgttgctggagatggcgccaacgttcttgcctgcactggaagctcgcctgtcgaacgaagtccgtaaagcaatgattgccagtgggatgaaaatgcaactggcagtagagattgaggctattgaacaacgggatgacggtgtgcatgtgcgctggcggcagggtgagaagcgagaagaaagccgcttcgataaattaattcttgccattggacgtgtaccgcgactttctggtgtcgatctcgtgcaactcggtcttgaagccgacaaccgtggcggtattgccgtcgataacttatgccgtaccgggaaagccgggctgtgggcaattggtgatgtcgtgcgagggccgatgctggcgcataaagcgatggctgaaggtgtggtggttgcggatcaaattgccggactggcggtagagccgattaattttgcgctgatcccttcggtgatttacacccaaccggaagttgcgtgggtaggggaaaacgaggcctcactgaaagccgctggcagagtctttaacaaaggaaattctctgtttgccggtaacggtcgcgccttagcattaggccaggaaggtgggcgttgcacgttatacagcgataaacacactgaccgcgtacttggcggagcgattgttggcccgcaggcatccgagctgatcaatgaaattgcgctggcgatgacttttagcgcctctggcgaggatattgcctgtgcgatccatgcgcatccgacattaagcgaagtcatccacgaagcagcaatggccttgaataataaagcattacacggataacacataccactgagggaatatatgaatttacatgagtatcaggccaaatcgttactggctggcatggggatgccgtgtccaaaagagatagccatccaacagatttcgcaactggcagatgcctggcaacatattgcttgcccgagtaaaggcgcggtacttaaagcgcaggtacatgctggtgggcgcggtaaagctggcggcgtaaaagtgcttaagcagctgccggaagcacaggcttttgtacagcaaatgttgggatcgcaactggtgacttatcagaccgggccagaagggcagtatgtcagcagtattttgctgtgcgaaaacatctatccggtacgccaggaactctattttggcatggtggtggatcgtgaaagccagcgggtcacgtttattgtcagcccggaaggtggcgtggaaattgaaaaagtcgcccatgagacaccggagaaaatcagcagtgtcagcattgatccactgacaggcgtgcagccttgccatatccgcgaaatgtttgctgttctgcaactggaacacgggctatttgctgcctttagtcgcctggttaatcaggcgtggaaagcctttaacgaactggatttcgccctgctggaaattaaccctctggtgttgcgggaaacgggcgaatttatgtgtgcagacgcgaaagtatcgctggatgataacgcgctgtatcgtcacccggaactccaggtgctacgtgatgaaacccaggaagatccacgcgaaagccaggcagcgaagcttgatcttaattatgtctcgctggacggaaatatcggctgcatggtcaatggtgcagggctggctatggcaaccatggacatcatcaagctatacggtgaacaacccgcaaacttcctggatgttggcggtggcgcaacccaggagcgcgtcagtgaagcctttcggctgattgtttccgacagcaaagtgaaagccattctggttaatatttttggtgggattgtccgttgcgacatgatcgccagagccattattcatgctctgaatgaggcccgtatcaccctgcctgtcgtggtgcgtctctccggtaataacgctgccgaagggcagcggttactggcagaaagtggcctgacggtggaagccgtcaattctctggatgatgccgctaaacgcatcattgcgttactgaattaacaggaggttaagatgagcgttttgatcaacaaacacacgcgggtactggtgcagggcattaccggcaaaaacggcacatttcatacagagcaggctattgcgtatggcacgcagattgtgggtggagtgacgccaggtaagggcgggcaacggcatctggatcgcccggtttttgattcaatgaaagaagcgatgcgacaaactgaggctgatgccagcgtgatttatgtgcctgcaccgtttgtgctggattctgttgttgaggctattgaagctggcgtcaaattggttgtggtgatcactgaaggtgtaccgacactggatatggtgaaagttcgtcggctgcttgactgccacccggatgtgcggctgattgggccaaactgcccaggagttatcacgccgggcgagtgcaaaatcgggattatgcctggtgaaatccaccgcccagggcgtattgggattgtttcccgctccggtacattaacctacgaagctgtagcgcaaaccacggcgctgggacttgggcaatccacctgtattggtattggcggcgatccggttccggggactaactttattgatgcgctgcgtttattcgaaaatgatccgcaaacagacgcggtaattatgatcggtgaaattggtggtaatgcggaagaacgggccgcggaatttattcgccatgaaatgaataaaccggtcgtaggttatattgccggtgtcactgcaccaaaaggaaaacgcatgggacacgctggagccattatttctggcggtagcggcagtgcggaggataaattccgggcgttcgataaagcaggcatggcatggacacgaaatccagcattacttggcgaaacgttatggaatgttattaagtaatccataaatgaatatcaagggagcatatcgctccctttttttatctgtgtggtaagagaatcaccttttatttactgtgcggaaaaccgcgcacaaaataaaaagaataaataataaaatcattaaataacaaagcgttattaaaaaattaaagatggcatagctcctgcaatagccaggcaggttttttatttttcacaatgaggtgaatatgtcatcaatatcccatggcgcaccacaaaagcgtcgaattatccctaatcccggcctgtggttggcgatcattgccggaattattattacccttctgccactgggcgataccttgcccgtcgctggacaaaatatgatcgccattctggtgtttgccattattgtctggatcagcgaagcgatggattacaccgccagtgcaattgttatttccgcactgattatctttatggttggttttgccccggatatgaatcacccggacacgatccttggcaccgcgaaagcgctgaaaatgactctgtcgggtttttctaattctgctctggcgctggtggcagcagcaatgtttatcgcggcggcaatgaccattaccgggctggataaacgcattgcgctgtttactatgtcgaaaataggtgccagcagccgcagcattattatcggtgccattgtggtgaccatcgtcctgagcctggtcgtacccagtgccactgcccgtacggcttgcgtggtgccgattatgatgggggtcattgcggcatttaaggtggataaacattcacgtttagcggcgtcaatgatgattgttatcgcccaggcgaccagtatctggaacgttggtattcaaacttcggcggcgcaaaacctgctttctatcggttttatcaataaaactttcggcgccgggcattctgtcagctggcttgactggctgttagcgggcgcgccctggagcctcaccatgtcggtgatcctctatttcctcgcacgtaaattgttgccgccagaaacggaagctgttgaaggggggagcgaggccattaaaaaagcactcgcagaattagggccaaccaccggtaaagaaaaacgcttgatcggtatttcgctgttgttactgctcttttggtctactggcggaaaattacacagtattgataccacctctgtcacccttgccggactggcgattatgttgctgccaggcatcggtgtaatgagctggaaagaggtcgaaaaacgtgtgcagtggggcacgttgctgatgtttggtattggtatcagcctggggtccacgctgcttgatacgcaggcagcttcatggatggcgaactatgtggtgaaaggttttggtctcgatggcttgccatcattagccatcttcgcgattctcgccgctttcttgataattattcacctggggtttgccagtgccactgcgctaactgccgcattgctgcccatcctgattagcctgttaagcagtctgccgccagaactcggcgttaacccggtcggcatgaccattctgctcgccttcagtgtcagttttggcttcatcctgccgattaacgcgccacaaaatatggtgtgtatgggtacggataccttcacgccacgccagtttacccgtgtgggactgtacctgacggtaatcggctacctgttgttgctactgtttgccgctacctggtggaaaattttaggtctaatgtgaggaaaccaacgatgtcattacaaattgctgttgaaaaagtgcgttggttagctgccgggctgctggaacttaatggctgtgatgccgatatcgctcaggatgtggcggaacatatgattgaagcggaacgttatggctttgccagccacggcgtcacgctgctaccgaaatatctggaaaatatcgctcgtggcgatgtaaccgcgaatgcccgcccggaatgcttaacaagtgaaggtaatttacaacgttttcatgcccacaatggctttggtcaacacgccggaaaagtggcggtaaatgctgccatcgaacaagcaaaacgccgtggtttttgcctgttaacgttgtgccatgcgcatcatttagggcgtatggggcattacgggcaaatggttgctgatcaaggcctggcgatgctggccatgagtaacgttaccgggcgtccggcgctggtcgcgccctggggcggtgcggaaccgcgtatgaccactaaccctttctgctttgcctggccgttcagtgatgggcgtccgccgattctggttgattttgccaccagtagcatggcgctaaataaagcacgggtaatgtcgtccaccgggaagcaggccgcgccgggacaattgattgatgcacaggggaatccaagcaatgatcctggggtgttattcagcaatcctccaggggcgttactgccatttggtgagcataaaggatttggcctggcactgatgattgaaatgatggcggggatcttatctggtggtgacacgatcgccgaagatcatcagacggatggatctgcgcataatcatctttttgcgttgattatcgatcctgatcaattcaccgatctggcaggggagaaagggcagttctttgcggattatctgttagctacgcagcctcaacctggcggcaatccggtgatttaccccggtatgccagaagctgccaaccgggaacgcaatgcgaagatgattacgatcccggtatcattctggtcctgggtagttgaacattacgcccgcaaaggtatcgatttggggttacatcctcaggaatcagcattagctggatgattctggtcgataaacttgcggttgaatctgatgtttgttgagtttgtcatataaagtcttgcgcggcagctgtaatagccgcgctgtcaaactgacctggccttccgtttgtcgcagcatatcttcgattaactttttctcgaaagcatcaatgcaggcggtaaggccactctcttcttgctgagtcattggcactggctggtggtgggtcagtaaaccgagaacaaaacgctctgcattgtgtttaagttcacgtacattgccaggccaactttgtgattgcaaccaggccagtaacatgggagaaatatcaggcagaggacgattatatttttgtgccgcctgactggcgaaccagtaaaacagttcagggatatcttctcgtcgctggcgtagaggtggaatattcaggctaaccacattcagacgataatagagatcgagacgaaacagatgttcttcgctgcgacgcagtaaatcttccttggtcgctgcaataacacggcaattcaccggaattaattgattggcacctaatcgttcaatggttctttcctgcaatacacgtagcagttttacctgcattcctgatggcattccctctatttcatcgagaaataacgtaccaccatttgcatgttcaatttttccaatacgctttttaaccgcaccggtaaatgcgcccgcctcatgaccaaatatttcgctttcaaacaacgtttctggtaagcctgcacagtttaaggcaacaaactgcccctgacggcgggtactccagtgatgcagcattctggcgacgacttctttaccacaacctgtttcaccataaataaggacatcggcaccggtatctgcgacattaaggatcattttacgcagttgttgcatctgcggactacgaccaatcagcaccgggccattttcctgttgcagattcgccagtaattgctgattttctaaaaccaatcgccgtttttctaccgctctggcaataatactcaataatttatctgagctacttggtttctcaatgaaatcgaatgcaccattacgcatggcatccaccgccatttccacgtcaccgtgtccggtaattaaaataaccggaattttgctatccatttcgttgatgtaactgaggagctctagtcctgatattccaggtaacctgacatcggtcagtataataatgttggcctgactttgaataaggggaatactgtgttctgcatcgcaacaggaaataacacgataaccagccagcgtgagcgtttgttcacaggcaaaacgtacatcgtcactatcctcaatataaactatagtaatttcactggatttattattcatgttcttctccccattcaggccaggttaatgtcattactgcgccgccttcaggatgattactggcgtggagtgcgccgttcgaatttcggacaatttcgctgactattgccagtcccaaccccattcctctacgtttagtggtaaaaaatggttcaaatatgcgatcgacaacttcaggtgcaaaaccgccaccgctgtctttaatggtaataataactttgttatttgcctggcgaatggcgatatccagtcgtttgtaagagctaccttccatagaatctaaggcgttgctaattaaattactgaatatctgttcaagaccgagctcatcgcaattgacaaataacggcatggatggggcttttattcgtcgctcaatgttatttttctccatgctgtgattaagtaacgccacggcgctatacatcactttgatgacatcggcagaacctttaggtacgcgatggcgcgaggcaaatgctttaagttcggaaatgagctgcgtcatccgctcaatcactgaaataatatgtttcagattctgttcaacctgcggatacatctctttttttagcatagtacgcgcgttatcagtaagtgcgtgaatggcggctaacggttgattttgttcatgggcaatttcggttgccatctgtccaagcgccgccagtttgttggactctgccagttcactacgcgtaatttgtaatacttgttcagcttgactgcgctcttttatctcctgtattaatttttgattgatcaattccagggcagatgtacgctctttaacctgtttttctaatgtttcattcgcaagtgttaataattgttgtgcatgagatcgcattctccagtatttaataaataacaaaaacagcaggtaaataattagtgtaatgactaacgaaatagcccatgaccagtacaggttatctaaggggaccataattgtcattttccagttaaattctggaatggctatttgttgcgtataatattgcgggaataaacagagttgttcttttttatctttcaggaaagtaaaattgctcacggtataacagggataataatccgccggtaaaagattgtcgagactatattggcgggtagattgtattttttgttttgcctgaacaggtaacggttgcagtgttcgcattcgccatggcgattttgaacttaaaaatataatcccatgttcatcattcacgataatattttcaggaccttcggcccatgctttttcaatttcattaagacttatttttactactacaacaccgacaatttttcctttatcttttatacttgtagagaggaagaatcccggtgtattcgtagtgctaccaataccgtaaaagcgtccatttaagccagacatggcgtgtttataataggggcgatagctataattttgccctacatagctgccggggtcctgccagttgctagaagcgatggccttaccttgggtatccagaataaatattgctgcggttttgagttgagtattgaaatgtgcaattcgttgattgagttcgctggacgtcatatcgtcaggcgtaattaccgcctgacggatgatatggtctgttgagagcatatagggtaaaacataaaattgctcgatggtggaatataatgtggacttatacatttcaagccgcattttatcggtactggacaaggtattaaaacgcaagtgcaaaaaagcgattgaaaccgcgagcatgataagaaaaagtgaaatgcttgtaatgtgaaatcgccatttgttcttaaatatataattccacgatattttcattcatcatccattgaatgcatttatatttatcatcagtatattccctgaacaatgtttgcgagaaccaaaagagtgccattgtgtgaatgtgtaagcagaataaccgtggcaatgtgtggtttatcgcacaggtattccaaatgtgatcatgctctttttatgtgacaaatccgcagataatccttcctttcccccgcggttggcgttatggtcagatggttttttcaacaaacgcacaataataagtttcaacttactgactatttagggaaaaatatgcgcaagatcacacaggcattgagtgccgtttgcttattgttcgctctaaacagttccgctgttgccctggcctcatctccttcaccgcttaatccgggtactaacgtagccaaactcgctgaacaggcgccaattcattgggtttcggttgcacaaattgaaaatagcctcgcaggacgtccgccaatggcggtggggtttgatatcgatgatacggtacttttttccagtccgggtttctggcgcggcaaaaaaaccttctcgccagaaagcgaagattatctgaaaaatcctgtgttctgggaaaaaatgaacaatggctgggatgaattcagcattccaaaagaggtcgctcgccagctgattgatatgcatgtacgccgcggtgacgcgatcttctttgtgactggtcgtagcccgaccaaaacagaaacggtttcaaaaacgctggcggataattttcatattcctgccaccaacatgaatccggtgatctttgcgggcgataaaccagggcaaaatacaaaatcgcaatggctgcaggataaaaatatccgaattttttatggtgattccgataacgatattaccgccgcacgcgatgtcggcgctcgtggtatccgcattctgcgcgcctccaactctacctacaaacccttgccacaagcgggtgcgtttggtgaagaggtgatcgtcaattcagaatactgacagagcgggagagcgtaatactctcccgaatgctgtttttttaatcacacctttatcctttcgctgtcttgctgcaaactgattaagagagttttatcaaggagcagcacatgtggtatcaaaagacgctcacgcttagcgccaaatctcgtgggtttcatctggtaacggatgaaattctgaatcagctggctgatatgccgcgcgttaacatcggtttactgcatctgttgctgcaacatacctccgcctctctgacacttaatgagaactgcgatcccaccgtacgccacgacatggagcgttttttcctccgcgccgttcccgataacggaaattatgagcatgactatgagggagcagacgatatgccttctcatatcaaatcctcaatgctgggaacatcgcttgtattgccggtgcataaagggcgtattcagaccggcacctggcaaggcatctggctgggggaacatcgcatccacggcggatcgcgtcgcatcatcgcgacactacaaggggagtgaaaaatgaccatttcggagttgctacaatattgcatggcaaaaccaggcgcagaacagagcgtgcataacgactggaaagcgacgcagatcaaagtgggagatgtgctgtttgcgatggtgaaagaagtagaaaatcgcccagctgtttcgctgaaaaccagcccggagctggcggagctgctacgtcagcagcacagcgatgtgcgtccaagccgccatctgaataaagcgcactggagcaccgtgtatctcgacggttcgctgccggattcgcaaatctattatctggtggatgcgtcttatcagcaggcggtgaatttgctgccggaagaaaaacgtaaattgctggtgcaactctgaaagaagaaggccgctctgaaagcggccttaacgattacagcatcggcttgaggaagcgcgccgtatgcgaagctttgcactctgcgacggtttctggcgtaccggagacgaggatttcgccgcccccactgccgccttccggtcccaggtcgacaatccagtcagcggttttgatcacgtcgagattgtgctcaattaccacaatggtattgccctgatcgcgcagtttatgcagtacgtcgagcagttgctgaatatcggcgaagtgcagaccggtggtcggctcgtcgagaatatacagcgtctgcccggtgccgcgttttgacagctcacgcgccagcttcacgcgctgggcttcaccaccagaaagtgtggttgcggactgcccgaggcgaatgtacgtcaggccaacatccatcagcgtttgcagcttacgcgccagagctggcaccgcatcaaagaactcacgcgcctcttcgatggtcatatccagcacttcgtggatggttttgcctttgtacttaatctccagcgtttcacggttatagcgtttgcctttgcactggtcgcacggtacgtaaatgtccggcaggaagtgcatctccactttgatcacgccgtcgccctgacaggcctcgcagcgtccgccacggacgttaaagctgaaacgtcctggcgtatagccgcgcgcacgggattccggtacgcccgcaaacagttcgcgcacaggtgtaaacacgccggtataggtcgccgggttagaacgcggagtacgaccaattgggctttggtcgatatcgatcactttatcgaaatgctccagtccctgaatatcgcgatacggtgccggttcggcgatggtcgcaccattcaactggcgttgggcaatcgggaacagtgtgtcgttaatcagtgtcgatttaccggaacctgaaacccctgtgatgcaggtaaacagaccgactggcagcgttagcgtcacgtctttcaggttattaccgcgtgcacccgtcagcttcagcactttttccggattcgccggaacgcgtttcttcggcacttcaatcttgcgtttaccgctcatgtactgtccggtcaacgactccggcaccgccataattgcttccagtggaccttccgcgaccacttcaccgccgtgaacacccgcacccggaccgatatcgatcacatgatcagcggcgcgaatcgcgtcttcgtcgtgctccaccacaatcacggtattaccgagatcgcgcagatggataagcgtacccagcaggcgctcgttatcgcgctggtgcaggccgatagacggctcatccagcacgtacatcacgccaaccaggcctgcaccaatctggctcgccagacgaatacgctgggcttcaccgccggaaagtgtctctgctgagcgggaaagtgtcaggtaattcaggccgacgttaacgaggaatttcaggcgatcgccaatctccttaagaattttttccgcaatcttcgctcgttgacctgcgagtttgagattgttgaagaattccatcgcatgaccgatgctcatgtcggagatagcaggcagcggcgtattctcgacatatacatggcgcgcttcccgacgcagacgcgttccttcgcagctggcgcacgggcgattgctgataaacttggctaattcttcacgtaccgcactggattccgtctctttataacggcgctccatattgtgcagcacgccttcgaacggatgacgacgaatggaggtatcgccacgatcgttcatgtatttgaattcaatattttctttgccagaaccgtacaacaccactttatgcacgttcgcgctcaggctgccccacggcgcttcgacgtcgaacttatagtgatctgccagcgatttcagcatctggaaataatagaagttgcggcgatcccagccacggatcgcaccgccagccagcgataattccggattctggatcacgcggtcaggatcgaaatattgctgtacgccaagaccgtcacaggtcgggcaggctcccgccgggttgttaaatgaaaacaggcgaggttccagctcgcgcatactgtaaccgcaaatcgggcaggcaaagttggcggagaacagcagctcttccgctttcgggtcgtccatatccgccactaccgcggtaccaccggaaagctccagcgcggtttcaaacgactcggcaagacgttgggtaagatcgtcacgcactttgaagcgatcaaccaccacttcaatggtatgtttcttttgcagttccagtttcggcggatcggaaagatcgcagacttcgccatcaatacgagcacggatgtaaccctggcttgccaggttctccagcgttttggtgtgttcgcctttgcgctctttaatgattggcgcgagcagcatcagacgcttgccttccggctgcgaaagcacgttatccaccatctggctgacggtttgcgccgccagcggaacatcgtggtccgggcagcgcggctcaccaacgcgagcgtacagcagacgcaaatagtcgtggatttcggtgattgtccccaccgtagagcgcgggttatgagacgtcgatttctgctcaattgagatggcaggagaaagcccctcaatatggtcgacgtccggcttctccatcagtgacagaaactgccgcgcgtaggcggaaagggattcaacgtaacggcgctgcccttcggcatataaggtgtcgaaagcgagcgaggatttgccagaacccgaaagcccggtcacgacaatgagcttgtcgcgggggataacgaggttgatgtttttgagattatgggtgcgggcgccccgaacttcgatcttatccattcacctttcccggattaaacgcttttttgcccggtggcatggtgctaccggcgatcacaaacggttaattatgacacaaattgacctgaatgaatatacagtattggaatgcattacccggagtgttgtgtaacaatgtctggccaggtttgtttcccggaaccgaggtcacaacatagtaaaagcgctattggtaatggtacaatcgcgcgtttacacttattcagaacgattttttttcaggagacacgaacatggccagcagaggcgtaaacaaggttattctcgttggtaatctgggtcaggacccggaagtacgctacatgccaaatggtggcgcagttgccaacattacgctggctacttccgaatcctggcgtgataaagccaccggcgagatgaaagagcagactgaatggcaccgcgttgtgctgttcggcaaactggcagaagtggccagcgaatatctgcgtaaaggttctcaggtttatatcgaaggccagctgcgtacccgcaaatggaccgatcaatccggtcaggatcgctataccacagaagtcgtggtgaacgttggcggcaccatgcagatgttgggtggtcgtcagggtggtggcgctcctgcaggtggcaatatcggtggtggtcagccgcagggcggttggggtcagcctcagcagccgcagggtggcaatcagttcagcggcggcgcgcagtctcgcccgcagcagtccgctccggcagcgccgtctaacgagccgccgatggactttgatgacgatattccgttctgatttgtcattaaaacaataggttatattgttttaaggtggatgattaaagcatctgccagccataaaaaagaagcctccgttatggaggcttctacatatcaagtcaaaatcattggccattgtggcggtgtctgattcatctcttctaccatcaccgactcgatgttgtgccagatggcggtgatatccgccattgtgatgccaagcaaccccattgcgaaccagcaggcggaaactacgcccagaccgctgctgatcactgcaagcccgacataatcagcccgacgaaaacggatgttgagcgtgctagccagaaacatcattacggcactaagaagttgccagcgaagaagaaccacgccagtggtgagggtagccatcaaacaattcctcggaaaagagctgatgccctggacagcgcggcgttgttcacgggaggcgtgatacactctggctatcgcggggcttgcagaacacaaaaatgaaacactctgtttgtttcatgaattttgtgaactatatcacaattggttgtttgttagccagattaggccgtgacttttattgccgtacagattatgtgttttttcagcggcattaagggtatatcttcccgccgcctctgcattcctgaaggtgattaatttttaagatcaatgaattatcgtcatcctggtgacgattaaaaaggtctcaattttatatcaggcaaaagtgctatttataccgtaagatttatctaaagacgtcggtagccagggtttcaccttgcaataaccgggtataaacaggcagggaattgatagcaatgagtcatcgtgcacgacaccaattactggcgtttccgggcattatctttttagttctctttcccatcattatgtcgctatggattgccttcttttgggcaaaatcagaagtgaataatcagctccgaacttttgctcagctggcgttggataaatctgagctggtcattcgtcaggcagatttagtgagcgatgcagctgaacgctatcaggggcaagtttgcactccagcccatcaaaagcgaatgttgaatattattcgtggctatctttatattaatgaattgatttatgctcgtgataaccattttttatgctcatcgctgatagcgtctgtaaatggctatacgattgcaccggccgattataagcgcgaacctaacgtttctatctattattaccgtgatacgccttttttctctggctataaaatgacctacatgcagcggggaaattatgtggcggttatcaaccctctcttctggagtgaagtgatgtctgatgatccgacattgcaatggggagtgtatgatacggtgacgaaaacctttttctcgttaagcaacgaggcctcggcagcaacgttttctccgctgattcatttgaatgatttaaccgtacaacgaaatggctatttatatgcgacagtttattcgacaaaacgcccaattgcagccattgttgcgacttcatatcaacgtcttataactcatttttataatcatcttatttttgcgttgcccgccggtattttggggagtcttgttctgctattactctggctacgtattcgacaaaactatttgtctcccaaacgcaaattgcaacgcgccctcgaaaaacatcaactttgcctttattaccagccaataatcgatatcaaaacagaaaaatgtatcggcgctgaagcgttgttacgttggcctggtgagcaggggcaagtaatgaatccggcagagtttattccgctggcagaaaaggaggggatgatcgaacaggtaactgattatgttattgataatgtcttccgtgatttgggcgcgtatctggcaacacataccgatcgctatgtttctattaacctgtcagcctccgattttcatacctcacggttgatagcgcgaaccaatcagaaaacagagcaacatgcggtgcgcccgcagcaaattaaatttgaagtgactgaacatgcatttcttgatgtcgacaaaatgacgccgattattctggctttccgcaaggccggttacgaagtggcaattgatgattttggtattggctactctaacttgcataaccttaaatcattgaatgtcgatattttgaaaatcgataaatcgtttgttgagacgctgaccacccacaaaaccagtcatttgattgcggaacacatcatcgagctggcgcacagcctggggttaaaaacgatcgctgaaggtgtcgaaactgaggcgcaggttaactggctgcgcaaacgcggcgtgcgctattgccagggatggttttttgcgaaggcgatgccgccgcaggtgtttatgcaatggatggggtaattacccgcgcgggagttaacgcgcgggcaataaaactacaggcggtggcgataatcgctgggagtgcgatcaaactgccgacggaaaacgcgggagaaggtctgctgagagacataacccaggtccattgcgatatcaaaaatcggacgctcggtggtgcgcaactcaacggcggccagtaacagacggcgctggcgaatgtaatcgccaagcgtctgatgcgtcaccgtgcggaacatccgttgcaagtaccactttgaatagccagatttttttgcgacgacatcaatgttaagcggctggtcaatatgctcgtcaatccatgcgataagatcctgaataattttctgatgggacataaatctgcctcttttcagtgttcagttcgttaattcatctgttggggagtataattcctcaagttaacttgaggtaaagcgatttatggaaaagaaattaccccgcattaaagcgctgctaacccccggcgaagtggcgaaacgcagcggtgtggcggtatcggcgctgcatttctatgaaagcaaagggttgattaccagtatccgtaatagcggcaatcagcggcgatataaacgtgatgtgttgcgatatgtcgcaattatcaaaattgctcagcgtattggcattccgctcgcaaccattcgtgaagcgtttggcgtgttgccagaagggcatacgttaagtgcgaaagagtggaaacagctttcgtcccaatggcgagaagagttggatcggcgcattcataccttagtggcgctgcgtgacgaactggatggatgtattggttgtggctgcctttcgcgcagtgattgcccgttgcgtaacccgggcgaccgattaggagaagaaggtaccggcgcacgcttactggaagatgaacaaaactaaagcgccacaagggcgctttagtttgttttccggtctttgtctttctctctatcccgctggtacacaggagggtttcccccgacgtcaacacacctcattcgagcacgtggtggaggttccggttggtgttgatgctttaattgtatgtgaccggcgtttcttcgccagtgtaaaagtacactttttagccgcaatatttttgtcatctcagacgattttttatcgcaatcctgaacggtatacggctcgataacgctgcaatcttgcgcatcgacgataacgtttgcgcatcaattgcctggtttttcatcgtcaagacaataaaagagaaaaaagcagcaaacttcggttgaaaaagccgctatgatcgccggataatcgtttgctttttttaccacccgttttgtatgcgcggagctaaacgtttgcttttttttgcgacgcagcaaattgtcgcaaacctggagcaggaagataacgtttcgctggcaggggattgtccgccacgcatcttgacgaaaattaaactctcaggggatgttttcttatgtctacgccatcagcgcgtaccggcggttcactcgacgcctggtttaaaatttcacaacgtggaagcactgtccgtcaggaagtggttgccgggttaacaacgtttctggcgatggtctactcagttatcgtcgttccaggcatgttgggtaaagcgggcttcccgcctgcggcagttttcgttgcaacctgtctggttgccggactcggttctatcgtgatgggtctgtgggctaatctgccgttggcgattggttgcgccatctctctgacggcgtttaccgcattcagtttggtgctggggcaacatattagcgtacctgtcgcgctgggtgccgtgttcctgatgggtgtgttgtttacggtaatttctgccacgggtatccgtagctggattttgcgcaacttgccgcacggtgtggcgcacggcacggggattggtatcggtctgttcctgctgctgattgctgctaatggtgtcggtctggtgattaaaaacccacttgatggtctgcccgtcgcgctgggggatttcacgacctttccggtgatgatgtcgttggtgggtctggcagtgattatcggcctggaaaaactgaaagtccctggtggcattctgctgaccattatcggtatctcaattgtcggtttgatcttcgatcctaacgtccatttctccggcgtttttgccatgccttcattgagcgatgaaaacggcaattcactgattggcagcctggacattatgggcgcgctgaatcctgtagtcctgccaagtgttctggcactggtgatgacagcagtatttgatgccaccggaactatccgtgccgtcgccggtcaggcgaacctgctggataaagatgggcagatcatcgacggcgggaaagcactgaccaccgactccatgagcagcgttttttctggcctggtgggtgcagctccggcagcggtatacatcgagtctgcggcgggtacggcggcgggcggtaaaaccggtttgacggctatcaccgttggcgtgctgttcctgctgattctgttcctctctccgctctcttacctcgttccggggtacgcaacggctccggcgctgatgtacgttggcctgctgatgctgagcaacgtggcgaaaatcgactttgctgattttgttgatgcgatggcgggtctggttacggcggtattcatcgtgctgacctgtaacatcgtaacaggcatcatgattggcttcgcgactctggtgattggtcgtctggtttccggcgaatggcgcaagttgaacatcggtacggtcgttattgccgtggcgctggtgaccttctatgcgggtggctgggctatctaatcttacataggattctgaaaacgggtggcaatggctgcccgtttttattttctccgcacattgtgtgagcttttgcgatattctgaaaaaatgagaattcaggcataacgcctttctcagatcataaaaaacatcgcaaacagggaacgcatggaaatcttcttcaccatactgataatgaccctcgtggtctcgctgtccggggtggtcactcgtgtcatgccctttcagatcccgcttccgcttatgcaaatcgccatcggtgcgctactggcgtggccgacgtttggtttgcatgtggagtttgatcctgaactctttttagtcttgtttatcccgccgttgctgttcgctgatggctggaaaacgccgacccgtgaatttctcgaacatgggcgagagattttcggcctcgcgctggcgctggtggtggtcaccgtggtcggcattggcttccttatttactgggtggtgccgggcattccgctgatccccgcctttgcgctggctgcagtgctttctccgaccgatgctgtagcgctctccgggattgttggcgaggggcgcatcccgaaaaaaatcatgggcattttgcagggcgaagcgttgatgaatgacgcctccggcctggtgtcgttgaagtttgccgtggcagtggcgatggggacaatgatcttcaccgtcggcggtgcgacggtcgaatttatgaaagtggcaataggcggtattctcgccggttttgtggtgagctggctgtatggtcgctcgctgcgattcctcagccgctggggcggtgatgaacccgcgacgcagatcgttctgctgttcttgctgccattcgcttcttatctgattgcggaacatattggcgtttccggcatcctcgctgcggttgccgccgggatgaccatcacccgctccggtgtgatgcgccgtgcgccgctggcaatgcgcctgcgcgcaaacagcacctgggcgatgctggaatttgtctttaacggcatggtgttcctgctgttaggtctgcagttgccggggattctggagacgtcgctgatggcggcagaaatcgaccctaacgtcgaaatctggatgctgtttaccgatattattctgatatatgcggcactgatgctggtccgtttcggctggctgtggacgatgaaaaagttcagcaaccgcttcctgaagaagaagccgatggagtttggttcgtggactacacgagaaatcctgatcgcgtctttcgccggggtgcgtggggcgatcactctggccggtgtgctctctatcccgcttctcttgccggatggtaacgtcttccctgcgcgctatgagttggtgttcctggcggctggcgtcattctcttctcgttgtttgtcggcgtggtgatgttgcctattctgctacaacacatagaagtcgcggaccattcgcaacaattgaaagaggaacgtattgcacgagcggcaacggcagaagtggcgattgtggcgatccagaaaatggaggagcgtttggcggcggataccgaagagaatatcgataaccagctgctcacagaggttagttctcgcgtcattggtaacctgcgtcgtcgcgccgatggacgtaatgatgtagaaagttcaatcctggaagagaacctggagcgtcgcttccgtctggcggcattgcgttctgaacgtgctgaactgtaccacctgcgcgccacgcgggagatcagtaacgaaacgctgcaaaaattactgcacgatctcgatttgcttgaagcgttgctgattgaggaaaatcagtaatctgcatggttggcgggcgagcccgccaacccgacttacactggcgttaaccagtatccttcacaacagctcagccacgcgtgggcagagtgggaaaggtaaacgccctcacgccaaatcattcctaatttccagcttagttcgctttccagcggtagccattttaaggtgtttttatctaatcgctggcaaatgggttccggcaatatggctattccgacaccggcctgaaccatcgcggcgagaaaatcccattgcccgctgcgaactgcaattctcggcttaacgccatgttcatcgaataacttcatcaattgcttacttaaggcaaaatcttcgttatagataagtagaggatgttccgccaatgtctccggtgagacggcatcacattcaagccatttacctgaatgtggcgtcagtacacatagtggatgactaaacagcgataacgttgtcaggccgctttcttctactggcagggctgtcagtgccatatccagttcaccgttcatcaccgcttgttgtaccgtcagaccaccaaactccgaaattttcaattctacgccggggtaacgctggcgaaaaaggccaatcggcccggccatcaacatcccaaccatcggcgggattcccagccgcaaaacgccggttttaagctgattgatatcgctaagctcagcttccagttgccgaaactcagccagtaaagccagcccgcgctcaaatacgacgcgaccagtatcagtgagaagcagccgacgaccatcgcggatcaacaatatacagttcagctcatcttcgagattcttcagcatcttgctgatagttggttgggtgacaaacaacttctccgctgcgcgggtgaagctttgctggcgcacgacttcgacaaaataacgcagcgttctgatatccataactattccctttgactatacctgcaatgattttaattcatttcagtcaggggcgagcgctctctatacttaccattctgttttattttcaggatatcctctcatgcccgtggcgcttcgccgcattacccctgccgtagtgcaatctatccaggtattttttcaggttgtgctgtatgcaggtttatttatttttgcgcagtatctcgtctcctggctgcatttgccgctgcctgccaacctggtggggatgatcctgatgctggcgctgattgtttgtcgcattcttcctctgcaatgggttcgagccggggcgcgttggctattggccgaaatgttgctgttttttgtccctgccgtggtggctgtggtgaactatgcacaactattactggtggatggctggcgtatttttgctgtgatcgcgctgagtacggtgatggtgctgggcacgactgcctgggtagtggaaaaagtctatcgctatgaaatgcgcaggttaaaccgtggctaattttcagctaagtatgctctgtctggcaattacgctagttatctattttcttaacaaacgcctttatcgccgctttcgtaaattgccattgatgcctctggtgctgacgcctacgctactggttatgctgctggtttttggcaatatttcctggcaaaactatattggcgaagcgcactggttactatggctattaggtccggccaccatcgcctttgcggtaccagtgtatgacaatcgggcgatcattaagcgtcactggatgtcgttgacggcaggcgtactgacggcaacggtggtggcagtgaccagctcagtgtggctggcgcgattgtttaccctgccagatgagatccagcgtagcctggcggtgcgttcggtcactacgccatttgctttggcagcgagccagtcgctcggcggacagcctgatctggtggcgctgtttgtggtggtcaccggtgtgtttggcatggcgattggcgacgtgttgtttttacgtctctctattcgcgaagggatggcgaaaggtgctggattcggcgcggcatctcatggtgccgggactgcgcggtcgtatgaactgggtcaacaagaaggcgtagttgcaagcctggtcatgatgctttcaggtgtattgatggtattggtttcgccgctggtggccaggatgatgttctgaagaaattccccgatcaagcgaccggggaaggggagagattaatgcgcgcggccctgctcaacgccaaagccagtctgggaacggataaactgcgcacggaacagttcacgctcgcgcgcaccttccgctgaattatccgttgccgagaataaccagataccgaggaatgccacgctgatagagaacagcgccgggtattcatacgggaagatggctttttcgtgaccgaggatctgtacccaaatagtcgggccgaggatcatcagcaccaccgcagtaatcagtcctaaccagccgcccagcattgcgccacgggtagtcagtttcgaccagtacatggaaagcagaatgatcgggaagttacagctcgccgcgatggcaaacgccagccccaccataaaggcgatgttctgattctcaaacagcacgccgaggataatggcaatcacaccgaggatcagtacggtgattttcgatacccgcagctcttcacgttcggtcgcaccttttttgaagacgttagcgtacaggtcgtgagacaccgccgatgcgcccgccagcgtcagacccgcaaccaccgcaagaatggtggcgaaagcaaccgctgaaataaagccgaggaacaggttgccgcccaccgcattggccaggtgaactgctgccatgttgttaccaccaatcagatggcccgccgcgtctttatattccggattcgcaccgaccagcatgatcgcgccaaagccgataataaaggtcaggatgtagaagtagcccataaatccggtggcgtagaacacgctcttacgtgcttcgcgggcatcgctgaccgtaaagaagcgcatcagaatatgcggcaagcccgccgtaccaaacatcagtcctagccccaaagagagcgcggagataggatctttcaccagcccgcccggcttcatgatgtcgacacctttcgggtgtaccgccatcgcttcgctgaacagattgttgaagctaaagccgacgtgtttcatcaccataaaggccataaagctggcaccgaacagcaacagcacggctttaataatttgtacccaggtggtcgccagcatgccgccgaacaggacgtacatcatcatcagcacgccgaccagcactaccgcaatgtgatagttaaggccaaacagcagctcgatcagtttacctgcgcccaccatctgggcgataaggtaaagcgccaccaccaccagagaaccacaggccgaaagaatacgaatcggcccttgtttcagacggtaagaggccacatcggcaaaggtgtagcgaccgaggttacgcagacgttcggcaatcaggaacaaaatgatcggccagcctaccaggaagcctagcgagtaaattaagccgtcatagccggaggtaaacaccagcgcggagatccccaagaatgaggcggcggacatatagtccccggcaatcgccagcccgttctgaaaaccggtgatattgccgcctgcggtgtagtagtcattacgcgaacgtacgcgttttgacgcccagtaggtaatgccgagcgtaaacacgacgaaaatcaggaacataataatcgcctgccagttcgttggctgacgctctacggccccgctaatagcatccgcggcgttagctgcgaaagggagtgtggcggcaagcgccgtcagaactcttttcatgatgcttgtacctcatgcaggacttcgttattaagacggtcgaattcgccgttcgcccgccagatgtagataccagtgagaacaaaggagatcacaattaccccgacaccgactggaataccgcgtgtgacgctggtgttcggattcagcggggtgcccagccagccgggcgcgaaggcgatcagtaaaataaagccgatataaactgccagcataataatcgacaggatggtggcaaaccgttgccgtttttcgactaactccctgaaatgcgcattgtcttctatccgctgataaatcgtaccattcatcacagattctccagaggtaatgtagggattgttttaattcccgctcccttatgggagaaggttaacgcttgggtaacccttgccgaatgtaggccggataaggcattcacgccgcatccggcaatcaacgcctgatgcgacgctgtcgcgtcttatcaggcctacagccgttgccgaatgtaggccggataaggcgtttacgccgcatccggcaatcaacgcctgatgcgtcgctgtcgcgtcttatcaggcctacagccgttgccgaatgtaggccggataaggcgttcacgccgcatccggcaaccagcgcctgatgcgccgctgtcgcgtcttatcaggcctacaaatcgtttccgacttgttgcccggagcgcatccggcaattgtgggttacgatggcatcgcgatggcctgcttctcttcaagcagcttctcgactacgccaggatcggcaagcgtcgaggtatcgcccaggttgctggtatcgcccgccgcaattttgcgcagaatacggcgcataattttgccggagcgggttttaggcagggagtcggtccagtgcagcacgtctggcgtcgccagcgggccaatctctttacgcacccagttgcggacttctgcgtacagttctggtgacggttcctccccgtgattaagcgtgacgtaggcgtagatcgcctgacctttaatattgtgcggaataccgaccacagcggcttcggcaattttcggatgcgccaccagcgccgactcaatctctgccgtccccaggcggtgaccggagacgttcagcacgtcgtcaacgcgcccggtgatccagtaatagccatcttcatcgcgacgcgcgccgtcgccgctgaaatacatatttttgaaggtggagaagtaggtctgctcaaaacgttcgtgatcgccaaacagcgtacgcgcctgacccggccaggagtcggtgatcaccagactgccttcggtggccccctccagcgggttaccttcgttatcgaccagcgctggttgcacgccgaagaacggacgtgttgccgaaccggctttcagctcggtagcgccaggcagtggcgtgatcatgaaaccgccagtttcggtctgccaccaggtgtcgaccaccgggcatttctcgttgccgatcttcttccagtaccactcccacgcttccgggttaattggctcgcccacggaaccgagaatgcgcagcgacgaacggtcggtgccttcgatcgctttatcgccttccgccatcagcgcgcgaatcgccgtgggcgcggtatagagaatattgacctgatgcttgtccaccacctgcgccatacgggcaggcgtcggccagttcggtacgccttcaaacatcagcgtggtcgcgccgcaggccagcgggccatacagcaaataactgtgtccggtaacccagcccacatcggcggtgcaccagtagatatcgcccggatgataatcaaagacatatttaaaggtcagcgccgcgtacaccagataaccgccggtagtgtgcagcacgccttttggcttaccggtagaaccggaggtatagagaataaacagcggatcttcggcgttcatctcttccgcctggtgctgagcgctggcttgctcaaccaggtcgtgacaccacaggtcgcgcccttcctgccagtcaatttttccaccagtacgcttcagtaccaccacatgctctacgctggtgacgttcgggtttttcagcgcgtcatcaacgtttttcttcagcggaatactacgcccggcacgcacaccttcgtcggaagtgatcaccagtcgtgaactggagtcgataatgcgtccggcaacggcttccggcgagaagccgccgaaaatcaccgaatgtaccgcgccaatgcgggcgcaggccagcatcgcgaccgcggcttccggtaccatcggcatataaatcgcaactacgtcaccttttttaatgcccagttcgagcagggtattggcgaagcggcagacgtcgcggtgcagctctttatagctaatatgtttgctctggctggcgtcgtcgccttcccagatgatggcggtacgatcgccgttttcttgcagatggcggtcaaggcagtttgccgccagattcagcgtgccgtcctcgtaccatttaatggacacattaccgggggcaaaggaggtgtttttcaccttctggtacggtgtgatccagtcgagaatttttccctgttcgccccagaaggtatctggtgcgttaatagattgttgatacatcgcctcgtactgctgagggtttatcaggcaacggtctgcgatgttggcaggaatggtgtgtttgtgaatttgactcatgcttttgttctccttgtaagatgttaataatatgtggcataagcgttaaatgtaggggtattggcagttttgtttagtatttgggcgacagatcacgcaaaagtagaattgtgcaaataaacggcagggtaatttttgaaggtcagcaacaaaagttgattaattctttgaggaacatgcagttatgcatgctgttgaaaaagaggaagatactgactaactctaaagtggtattttacatgcacttacaattgattaaagacaacattcatagtgtggttatttgttacacatagggacgagcaatgtcatgacagtgtaggtgcggttactgtcgtgaaaaacaataaaaaccgccattgcaacaatggcgcaattcggatgaagccctatgacaaggataaaaataaacgcacgccgtatcttcagcttattgattccttttttctttttcacttctgttcacgctgaacaaacggctgctcccgcaacacctgtaactgtggaagcgaagaatgaaacctttgccccgcagcatcccgatcaatatctctcctggaaagctacctcggaacagtcagagcgtgttgacgccctggcggaagatccacggctggtgatcctgtgggcagggtatcccttctcgcgcgattacaacaagccgcgtggacatgcctttgctgtgaccgatgtgcgtgaaaccctgcgtaccggtgcgccgaaaaacgctgaagatggtccgctaccgatggcgtgctggagttgtaaaagcccggatgtggcgcgtctgatccagaaagacggcgaagatggctacttccacggaaaatgggcgcgcggcggcccggaaatcgtcaacaacttaggttgtgccgattgccataacaccgcctcaccagagttcgccaaaggcaaaccggagttaaccctttcccgtccgtatgcggctcgcgcgatggaagccattggtaaacctttcgagaaagccggacgtttcgaccagcaatcgatggtttgcggtcagtgccatgtggagtattacttcgacggcaaaaacaaagcggttaaattcccgtgggatgacggcatgaaagtcgaaaatatggagcagtattacgacaaaattgccttctctgactggactaactccctgtcgaaaacgccaatgctgaaagcgcagcacccggaatatgaaacctggacagcgggcattcacggcaaaaacaacgtgacctgtatcgattgccatatgccaaaagtgcagaacgccgaaggcaaactctacaccgaccataaaattggtaatccgtttgataacttcgcccagacttgtgcgaactgccatacccaggacaaagctgccttgcagaaagtggtcgcggaacgtaagcagtcgattaacgacctgaaaatcaaggttgaagatcaactggttcacgctcacttcgaagcgaaagcggcgctggatgcaggtgcaacggaagccgaaatgaagccgattcaggacgatatccgtcatgcccagtggcgttgggatttggcgatcgcttcccacggcattcatatgcacgcaccggaagaaggtctgaggatgctcggtacggcgatggataaagcggcggatgcacgcaccaaactggcgcgcctgctggcgaccaaaggcattacccatgaaatccagatcccggatatctcgaccaaagagaaagcccagcaggccattggcctgaacatggagcaaatcaaggccgagaagcaggacttcatcaaaacggtgatcccgcagtgggaagagcaggcacgtaaaaacggtctgttaagccaataaccccgttccgcctcgcaaggggcggaaaacacaatggagtgaatatgagcgtattacgttcgttattaactgccggggtgctggcgtcgggcctgttgtggagcctgaacggaattaccgctacccctgcggcgcaggcatctgatgatcgctacgaagttacccagcagcgtaacccggatgccgcctgtctggactgtcataagccagataccgaaggtatgcatggcaaacatgcttctgttatcaacccgaataacaaactgccggtcacctgcaccaactgccacggtcagccatcaccgcaacaccgcgaaggggtgaaagatgtgatgcgctttaacgagccgatgtacaaggttggagagcagaacagcgtctgtatgtcctgccatctgccggaacagttgcaaaaagccttctggccgcacgatgtccacgtaaccaaagtggcgtgcgccagctgccattccctgcatccacagcaagatacgatgcagacgttaagtgacaaaggacggattaagatttgcgtcgattgccacagcgatcagcgcaccaatccgaactttaacccggcgtctgttccgttgcttaaggagcagccatgacctggtctcgtcgccagtttctcaccggcgtcggcgtgctggcagccgtcagcggcaccgcaggacgcgtggtggcgaaaacgttgaatatcaatggggtgcgttacggcatggtgcatgacgagtcgttatgcatcggctgtaccgcctgtatggatgcttgtcgggaagtgaacaaggtgccggaaggcgtctcgcgcctgacgattattcgtagcgagccgcagggcgaatttcctgatgtgaaatatcgcttcttccgtaagtcttgccagcactgcgatcatgcgccgtgcgttgacgtttgcccgaccggtgcgtcttttcgcgacgctgccagtgggattgtcgatgttaatccggatctctgcgtcggttgtcagtactgcatcgccgcctgtccgtaccgcgtgcgctttatccatccggtcacgaagacggcggacaaatgcgatttctgccgtaagacccatttgcaggccggtaagctgcccgcgtgcgttgaggcttgcccgacgaaggcgctgacgtttggcaatctggacgatcccagcagtgagatttcgcaactgctgcgccagaagcccacttaccgctacaagctggcgctgggaaccaaaccgaagctgtaccgcgtaccgtttaaatacggggaggtgagccaatgacgcagacttccgcatttcattttgaatcgctggtgtgggactggccgattgccatctacctgtttttgattggtatttctgccggtctggtgacgctggccgtgctgttacgtcgtgtctacccgcaggcgggcggtgcagacagtacgttgttgcgcaccacgctgattgtcgggcctggcgcggtgatcctcggtctgttgatcctcgtcttccacctgacaagaccgtggaccttctggaagctgatgttccactacagttttacctcggtgatgtcgatgggggtgatgctgtttcagctttacatggtggtgctggtgctgtggctggcgaaaatctttgaacatgatttgcttgccctgcaacaacgctggttgccgaagctggggatcgtgcaaaaggtcttgagcctgctgacgcccgttcatcgcggactggaaacattgatgctggtgctggcggtgttgttgggggcttataccggctttctgctgtcggcgctgaaatcgtatccgttcctcaataacccgatcctgccggtgctgttcctcttctccggcatctcgtctggtgcggcggtggcgctgatcgccatggcgatacgccaacgcagtaacccgcattccacggaagcgcactttgtacaccgtatggaaatccccgtggtatggggtgaaatcttcctgctggtggcgttttttgtcggtctggcgctgggcgatgacggtaaagtgcgtgcgctggtggcggcattgggcggcggtttctggacgtggtggttctggcttggtgtcgccgggctggggctgattgtgccaatgttgctcaaaccgtgggtcaatcgcagttccggcattcctgccgtgctggcggcatgtggggccagcctggtcggcgtgttgatgctgcgctttttcattctctacgccgggcagttaacggtggcgtaagccagaacagaggtggtttctggacgtattccttcctgaagtcagttttctggcgttgttgttaagtctcggggtcaacgtgttgaccccgttgacggccttcgcgggagtgcggttgcgctggcctgccatgatgcgactcacttgcatcggcattctggcgcagttcgcgctcctgctgctcgcctttggcgtactgacgtattgttttctcatcagcgatttctcggtcatttatgtcgcccaacatagctatagcctgctgtcgtgggaactcaaactggcggcggtgtggggcggtcatgaaggttcgctgctgctttgggtgctgctgctttccgcctggagcgcgctgtttgcctggcattatcgacagcaaaccgatccgctatttccgctgacgctagccgttttatctctcatgctcgccacactgctactgtttgtggtgctgtggtccgatcccttcgtgcggatatttccaccagcaatcgaaggccgcgatctcaatccgatgctgcaacatcccggtcttatctttcatccaccgctgctttatctcggctacggcggtttgatggtggcggcgagcgtggcactggcgagtttactgcgcggcgagcttgatggtgccagcgcccgaatttgctggcgttgggcactacctggctggagcgcattaacggcggggatcatcctcggttcctggtgggcctattgcgaactgggctggggcggctggtggttctgggatccggtggaaaacgcgtcgttattaccctggctttctgccacagcgctgctgcacagtttatccctgacacgccagcgggggattttccgccactggtcgctgttgctggcgatagtaactctgatgctgtcgctgctgggcaccttaattgtccgttctggcattctggtttcggttcatgcgttcgcgctggataacgtccgcgccgtgccgttgttcagcctgtttgcactgattagccttgcgtctctggctctgtatggctggcgagcgcgggacggtggcccggcggtgcgtttttcggggttatcgcgggaaatgttaatcctcgctacgctgttgctgttttgcgcagtgctactgatcgtgctggtgggaacgctttatccgatgatttacggcctgctgggctggggacgcctctccgttggcgcgccgtattttaaccgcgcgacgttaccgtttgctctgttgatgctggtggtgattgtgctggcgacgtttgtctctggcaaacgtgctcagcttccggcgctgctggcgcatgcgggcgtgctgttatttgccgcggggatcgtggtttccagcgtcagccgtcaggagatcagcctgaatttacagccgggtcagcaggtgacgctggcaggatacaccttccgttttgagcgcctcgatctgcaagccaaaggcaattacaccagcgaaaaagcgatagtggcactgtttgaccatcagcaacgcattggtgaattaacgccggagcggcgtttttacgaagcacgtcgtcagcaaatgatggaaccgtcaattcgctggaatggcatccatgactggtatgcggtcatgggcgagaaaaccggagcggatcgttacgcttttcgtttgtatgtacaaagcggtgtgcgctggatctgggggggaggattgttgatgattgcgggcgcattgttaagcggatggcggggaaggaagcgcgatgaataaagggcttctcacgctactgctgttatttacctgttttgcgcgcgctcaggttgtagacacctggcaattcgccaatccgcaacaacagcaacaggcgttaaatattgccagccagttacgttgtccgcagtgccagaatcagaacttactggaatccaatgcgccggtggcagtcagtatgcgccatcaggtttacaccatggtggaagaggggaaaagtgaagtcgaaatcattgactggatgaccgaacgctacggagattttgttcgctataacccaccgttaacgggtcagacgctggtgttgtgggcgctgccagtagtgttgttactgctgatggcactgatcctctggcgagtgagggcgaagcgatgaaacagccccaaataccggtgaaaatgctgacaacactcacgattttgatggtatttctctgtgtcggcagttatctgttaagtccaaaatggcaggcggtacgtgcggagtatcagcgtcagcgcgatccgctgcatcagtttgccagccagcaaaccccggaagcgcagcttcaggcattgcaggataaaatccgtgctaatccacaaaacagcgaacagtgggcgttactgggcgagtattatctgtggcaaaacgattacagcaattcgctgctggcgtaccgtcaggcgttgcaactacgtggtgagaacgctgaactgtatgcggcgctggcgacggtgctgtattaccaggccagccaacatatgaccgtccagactcgcgcaatgatcgacagagccctcgcgctggactctaacgaaatcaccgctctgatgctgctggcttccgatgcgtttatgcaggcgaactacgcgcaagccatcgaactatggcaaaaagtgatggatctcaactcaccccggatcaaccggacacagctggtcgagtcgattaatatggcgaaattgttgcagcggagatcagattaatcatctggtgatgaagattatgttattgagctgcataaaaaataatcgaatgaacatataatcaaaaataatcaccaatcagtattattgcagattaaacaaataaaaatccttctataacaaatggttattcattaatcctgccataaactcgcgttattatgcattaatgcagcgaaaagctctgttgttaaagggttgcgcaacataccgcgcaaatgatactgatcataagcgttaaaaaaatctacaaaccaacgcaacacaattcatgccctggcagtatgtcacgttctcgcgtttctgaacggggaacggcgctccattgaggaagttattctgatgaaaaatataaaattcagcctggcctggcagattctgtttgctatggtgctgggcattctcctgggaagctacctgcactaccatagcgacagccgcgactggctggtcgtcaatttgctctctccggcgggtgatatcttcatccatctgatcaaaatgattgttgtgccgattgtgatctccacactggtggtgggtatcgcgggtgttggtgatgccaaacagctcgggcgtattggtgcgaaaaccattatctacttcgaggtgatcaccaccgtcgccatcattttggggatcactctggcgaacgtcttccagcccggtgccggggtggatatgtcgcagctggcgaccgtcgatatctcgaaatatcagagcactacggaagcggtacaaagcagttcccacggcattatgggcacgattttgtcgctggtgccgacgaacatcgtggcgtcgatggcgaaaggcgaaatgctgccgatcatcttcttctcggtgctgtttggtctggggctttcatccctgcccgcgacgcatcgtgaaccgctggtgaccgttttccgctccatctctgaaaccatgtttaaagtgactcacatggtgatgcgttatgcgccggtgggtgtgtttgcgctgattgcggtgacggtggctaactttggtttctcgtctctgtggccactggcgaaactggtgctgctggtgcatttcgccattctgttcttcgcgctggtagtgctgggaattgtggcgcgcctgtgcgggttaagcgtctggatcctgattcgtattctgaaagatgagctgattctggcgtactccactgccagctctgaaagcgtgctgccgcgaattattgagaagatggaagcctacggagcaccggcgtcgatcaccagtttcgtggtgccgaccggttactcttttaaccttgatggttcgacgctgtatcaaagtattgccgctattttcatcgctcagctgtatggcattgacctgtccatctggcaggaaatcattctggtgctgacgctgatggtgacctcgaaagggattgctggcgtgccgggcgtgtcgtttgtggtgttgctggcaacgctgggtagcgtaggtattccgctggaaggtctggcgtttattgccggtgttgaccgtatcctcgatatggcgcgtactgcgctgaacgtggtgggtaatgcgctggcggtgctggtgattgccaagtgggaacacaaatttgaccgtaagaaagcgctggcttatgagcgtgaagtgctgggcaaatttgataaaacggcggatcagtaattgaagattgccggggggatatccacccggcaatgtgtggatgcctgactgagtaatagcctgatgtagcgtgatttttgtaggtcggataaggcgtttacgccgcatccgacatcaacgcctgatgcgacgcttgccgcgtcttatcaggcctacgtcagacagcgcaatagcctgatgtagcgtgattttgtaggtcggataaggcgtttacgccgcatccgacatcaacgcctgatgcgacgcttgccgcgtcttatcaggcctacgccagacagcgtaatagcctgatgtagcgtgattttgtaggtcggataaggcgtttacgccgcatccgacatcaacgcctgatgcgacgcttgccgcgtcttatcaggcctacgccagacagcgcaatagcctgatgtagcgtgattttgtaggtcggataaggcgtttacgccgcatccgacatcaacgcctgatgcgacttgcgcttgccgcgtcttatcaggcctacgccagacagcgtaatagcctgatgtagcgtgattttgtaggtcggataaggcgtttacgccgcatccgacatcaacgcctgatgcgacgcttgccgcgtcttatcaggcctacgccagacagcgcaatagcctgatgtagcgtgattttgtaggtcggataaggcgtttacgccgcatccgacatcaacgcctgatgcgacgcttgccgcgtcttatcaggcctacgccagacagcgtaatagcctgatgtagcgtggtttttgtaggtcggataaggcgtttacgccgcatccgacatcaacgcctgatgcgacgcttgccgcgtcttatcaggcctacgccagacagcgcaatagcctgatgtagcgtgattttgtaggtcggataaggcgtttacgccgcatccggcatcaatgtctgatgcgacggttgccgcgtcttatcaggcctacgccagacagcgcaatagcctgatttggcgtgatttttgtaggtcggataaggcgtttacgccgcatccgacatcaatgcctgatgcgacgtttgctgcgcctaccttaaccgttagttaatttttcaaactcttcacaaccggtatcaaacccttccatacagctcaggttcaaccagtgcagcgccttttgtttgttcttctcgataaaaccctcttcaccgtttaagaacatcattcccgcccagtattcggaataaccggttcgggaaatcgcagagctgcgtttgaaataccaggttgctttgtcatcgtcggccttaatgcccacgccgttggcgtaaatcaaaccaagcagcatttgggcatcgacggcagagtcgttctccagatcttccgaggcgttttctaacagcgaaatcgcctttggataatccggtttacccgcttgcgtatttaccagaatatgcgccagcgttacttcaccttctttactgcccgcttgcgctgctttctcggcaagcacttttgcttgtggatagtccagactgaccggattggtgattttgatctgcgccaacagcgcgcaggcatcggcatcaccgctgtcggcggctttctgtgcccaatattcggctttgctcaaatcgccggagctaaaccagctgtcggcaagaaaatattgtgcgcgtcggtctccggcctctgctgcctttaaatactggctgccaggctcggagtcgttcgcgtgggcaaagaatgtcaaaaacaacatcaaagtgataatttttttcattttgataatgaagtttggtaggggagagacagtataaagtgttcgggtggacaaaaaaacaactgtaaaaagacctgaaagcagaatgaattaatgcaatgtcaggttttttaatccatccgatgttcccccttttccatggcgtcgcgatcaaaaaatcgctgaatttttccctcggacatcaatgccgctcgatcagacatatgcgcgatgacatcggcatcgtgactgaccagcagatatgtcatttggtgttccagcttaagttgattcaacaaattaaggatttccgcttgtaccgacatatccaacgccgaggtgggttcatccagcagaagaagttgtggtcgtaacaacagggcgcgagcaataaccacacgttgccgttgaccaccggaaagctggtgtgggtagcgacgagcggcgtcgaaaggcaagccaacctgttccagtgcagtctggacgcgtttttctatttctctttcgccacgaattttgagtggttcagccagcgttcgccacagagtatgattgggatgcaacgaggcatagggatcctgaaacaccatttgcacattgcggcggagatcgccctgaaaacgcattcctggtttgatggtgtgcccaaacagtgacacctgaccgtgccagtcgcgctgtaatccagcaattacgcgcaaaatcgtggattttccgcagcctgattcgccaattaaactaaatgtctctccggcattaaccgaaaaactggcggcagaaactgcggttttctcagcaaaagtcacctgtaagtgattaatttcaacaatcgtcatggtatttctccggcgtcattgccgtcctgtccagcgtcggcagcatctgcccgtaagtttgtgcatttgggcggcaagtccacagtgtgcgcgtgtaaggatgcgttgctgtaggtagcgcagcagcgtgcatttcatccaccttatttccctgatacatcaccagcacccgatggcaaaattgggcaactaatggcaggtcgtgactgatcagcaacattgccatctgacgttgttcacactgggtaaccagcagttccagaatctgattacgcaggcgcacatccagtgctgatgttggctcatcggcaatcaatacccggggatcgttgatgagcgcaattgcaatcatcactcgctgccccatgccgccagaaagttcacgaggatagctttgcagtactcgcgtattgaggccgacagcctgaattgcggtgtttattttctcttctttctcgcggcggttcagacgttgatggagcgtaagcgcctcttccagttgcgcttttactgtctttactggattaagcgcgtaacgcggatcttgcaataccatcgcgatatcgttaccgcgcaactgttgccatccacgcgcgttaagggtgagtgcatcacgccccagaatgttaagtgtgtccgcggttactacacccggtttacgcaccagccccatcagggcgcgggcggtcatggacttacctgaacccgactcaccgaccagcgccagacgttcattgcctaatgtaaaactgacattgttgacgacccgggactccggataatcgacgcagagattgttgatactaagacgtgagtcagtcatgttgaggctccagaacatcgcgcaagccatcacccagcagattaaaggccagactggcaattaagataattgcgccgggagcggcggcaatccaccattgatcaaaaatgacctgcataccgtcggcgatcatggctccccattccgccattggcgggcgagcaccaagcccaagaaaacccaggccagcagccgccagaatgatacccgctaaatccagcgccagacggacaatggcagatggcaggcacaatggcaaaatatgaccagccagcagacgcctgccgcggatgcccatcatttctgcggcggcaagataatcactgtgtcgcagacgttggatctcactccgtgcctgacgcgcataagcaggccaggtggttaatgccagcgccagtgcgccgttaaccagccccggccccagcatggcaacaaaagcaaaagccagaattaaacgcggcattgacattactacgtcagtaaaacgcatcagcacgcgttccagccagccgccgtagtacccggctaaaatgccaatcagcagaccgaccgggagtgtaatgattgtcaccaatgccaccagccccagtgccggacggctgccgtagattaaacgtgaaagtaggtctcgcccgtaactgtcagtgccgagccagtgctgacgactcggtgcttgtaaccgcgccgccgcatcctgccagttaggatcgtgaggtgccagccacggcgcgaagagcgcaattagcatcaataacaggataattatcaacccgcaaaacgcggcgggtgaatggcgtaaacggcgtaaaaagagaaacatcggcatcagcgtaacctcggatcggtcagccggaccagcaggtcggttaagttatttatcaacacaaagcagacgccaatcagcagcgttcctcccatgattgctgtggtatcacccgcgaagagcgctgtagtgaggtagcgcccaatacctggccatgaaaagacggtttctgtcagtaccgcgccttccagcattgatgtataggcgagggcgataacagtgagcaaggtgccgcgaatgttgggtaaaacatgacgtagcaaaattgtcatctcgctggctcctttggcgcgcgccagcagaatatattctttattcatttcgccaagacaggcggaacgagtcaggcgcgtaatactggcgagcgagaagtacgccagtaataaaaccggaagtatcaaatggttgattgcattggtaaatgcctcgcgatcgccagaaagccacgtatcaatcagcgcaaatccgctgcggggttctatggtgaattgataaatatcatccagcctgcccggcccggcactccattgcagtctggcgtagaacagcgccagcatcagcagaccaagccaaaaaacagggacggaatttcccagtagagttaatgttcgcacggtgaaatccagcggagaaccgacataacgggcgcaaagtacacccgcaatgacgccgacaacagcaccgacaataagcgccaacgttgccagttcaatggtcgccgggaatgctgatagcaagtcctgaagtactggttgcccggtggagctggcgatgcccagatcgccgtgtgccagattcatcaggtaatgccagaactggacggctaacggctgatccaatcctaactggtggcgtacctgatcataggtggactggctggcgtgatcgccaacgatttgtagtacgcgatcgaccggtgagagagccgaaagcgcaaaggtaatcagcagcaggccgagtagcgtcagagcaacggtaaacagcccttgcaacagcgcgagcagagggcgcttgcctcgccatctcgcgcgagtggaaaaaacgacagacatgatctttccatacagtgataaatcagcggctggcctgcaatacaggccagccctggtaccgcgcccggtaacatggctggacgcgagttgcatacagggttatttggttacctgatcaaaccagaccatatcggcattcaacccttgttgatacccctgcacattatcacgcatgacaatttgcgttttgccttgatcaataaagacatacggggaactacgttgtagttcttgttgcattttcttatacaaatcaagacgtttagtgctatcaggttcagcgatggccgccagcgtttctttgttcagttccgggattttccagccgtttaacccggcaacggtgctggatttgccatcgttataggcgaaagagctggcgttggaatgtgcgtcaaaataatcaggcaaccacatacgaatggccccctgatgctggtgggcgcgaacgcgagagtagacctgactccctgcggctggcagcaaatcaacttttacaccgccctgagcaaagctggcctgaattgactgcgcgatggtaataaatggcggtttattttcgacatcaagcgtgaagtgcgggtctttgattccggctttagcgaggatctcttttgctttggctggattaaaggtaaacggtgtttcttccagtgctccaggaaagcccacgggcaggaaactttgatgggtaaaatattgtccttttaagagatttttggtgatgccgtcgtaatcgaccaaccagcgagcggcctcccagaacgcaggattactcatcagcgggttatccttgttaccggtattgaaggccaggtagttctgttcggcggaggcaatgctcatcacttttacgccaggtttaccctgtaatgcatcgatttgatcggctcccagatcacgagccatatcagcatcaccttgttggatcagcaggcgacgcgttgccggatcgggaacatttttgatgatgacgtttttcagtttcggggcgccggttggtgagctggcgttggcttccatcacgatggcctgatgcggttggtaagtacgcattttaaacgcgccgctgccagcggaatgcatcttcagccattcattaccaaagtcgttatttttggcgtttggcgcaaccagcttctcgtcaacaattgaggcgattggtgtggagagaatattcagtgccagcgccgggctgacgtcggcactccattgcacctggacggtatggtcatcgattttcttcaactggctggcgatattttctggctgccatcccagcacattgagaataaacgcaccggatttattcagtgtgacagcccggacataagagtaaatcacatcttccgggcgtaccggattaccagaggcaaatttcgcatcgcttttcagttttatggttagcgttttggctgcggggtcagcctgccaactttccgccagaatcggagtgattttcgtcggatcattacggtccggttgtactacgcgttgatacagacttggtacagtctgaatacttgagagttcattagcttctgccgggtccagactcacaatatcatccagcccctgggctacaaccaacgtattaggcggtgtagcggcaacggttgtggcggaaattgtgcttaaaaccagtaaaggtaatagttttttaatcatatgcttcccaatccctgaaattactttgaggttattaatatgctatcagacggggtttcgctgcattaatcgcgccagaatatcccgttaatagaacgagttaaatggtcgatgatttctcaccttaccgaaattttgtttatcaaatgtaaagtattattacgttaggccgcgatgagaattgagtaaagataattctcatttgcaatcgtgactggaatagaagaacaaccgagaagacgtcgctaataaccaggatgggctggtttgactgcgcaggtatgtataaaaaaatccggaaacagagagtcgtttccggattgatacaaaggcgttgggtaatatcgccgcttttaacgtgagtttacgcggtattacgccagtgccgcttcgcgcaggcgagttttcaacttgttgtactcgtcaatcacgtactgctcggcggcgcgctgatcggcgatcggctcgacgcgcacggcgcagtatttgtattccggcgttttcgtaatcgggcttaagttttcggtcaccagctcgttacaggcaccaatccaccactggtaggtcatgtaaatcgcccctttgttcggacgatcgctgacctgcgcacgggtgataattttgcctttacgcgagtgcacccaaaccaatgcctcatcttcaatacccagacgtttggcgtcttcggtattgatttgtgcgtagccaggttcatcagccagcgccgccagtgccgcacagttaccggtcatcgaacggcaagagtagtgaccaacttcacgcaccgttgacagtaccatcgggtactcgtcggtgagtttgtcgattggcgctacccagtcgcaggtgaagaactgcgccagaccgttcggggtatcaaacttctctttaaacagataagaagtcccctgatcggcatctgaagtatcgcggcaaggccactgaatgaagcccagttcgcccattttctcgtaagtcgcaccgtagaaatccgggcacagatgacgcaactcgtcccagatctcctgggtgttgttgtagtgcatcggataacccatacgagtggcaatttcactgatgatttgccagtccgttttcagatcccacttcggctcaaccgccttgaagaaacgctggaagccacggtcagccgcagtaaacacgccttcatgctcgccccacgacgttgacggtaaaatgacatccgccgccgacgcggttttggtcataaagatgtcctgaacgataaccagttccagatcttcaaaggctttacgtactgccgacagttccgcgtcagtttgcagcggatcttcgcccataatgtacgccgctctcacttcaccatgcgccacgcggtgcggcagctcgctgatgcgatagccggtatgagcaggcaggctttccacgccccaggctttggcgaatttctcgcggttagccggatctttcacgtactgatagcccggatacgtatccggcagcgcgcccatatcgcaggcaccctgcacgttgttctgaccacgaaccgggtttacacccgcatgtggcttaccgaggttaccggtcagcatcgcgaggctggtcagagaacgcacggtttccacgccctgatagaactgggttacccccatgccccacaggatggcggcgctttctgcctgggcatacatccgcgccgcctgacgaatctcactggcgctgacgccggtgatatcttcaaccgactccggcgtgtagccttcaacgattttacgatactcttcaaagccttctgtacgggaagcgacgaacgccttgtcgtacagattttcttcaataatgacatggcccatcgcattcaacagcgcgatgttcgagccgtttttcaatgcaatgtgcatgtcagcaatgcgcgcggtttcaattttacgcggatcgcagacgataattttcgccccgttacgtttagcgttaattacgtgattcgccacgattgggtgggaatccgccgggttatacccgaaaacgaacactaaatcggtattatcaatttcgttaatagcattgctcattgcgccattaccgaccgattggtgcagacctgcaaccgatgggccgtgtcagacacgagcgcagcagtcaacgttattggtaccaataacggcgcgcgcaaatttttgcattacatagttggtttcgttacccgtaccgcgcgaggagccggtcgtctggatggcatccggaccgtacttctctttgatggcgctcaggcgctcggcaacgtaattcagtgcctcatcccaggaaacaggttcgagtttgccgccacgctggcgacggatcatgggggttttcaggcgcggggtcaggatctgggtatcgttaatgaagtcccagccataataacccttcagacacagggtaccctggttggttttcccctgcgctgcctccgcccggacgattttgccgttatcgacgaccaggttgattttgcaacctgatgcgcaataggggcaaaccgtgacgacttttttcatcggtctcgctccagttaatcaaatcacgcatacgcgctctcgactacagtatgcatcttttatgccacattttatttggggtcattccctgatattacgggcactatttattcaaaactctgacgaaaaacaggctgtcgtcagttttgacgtgacgaaacgaaataccgcgtgacagccatcacgcggtagacattttattttttctcgacgatgggagccgcctgatacccgccgcccagcgatttcatcaactgaatgctttggatcacccggcggctgtccagcatcagtaatgacatctcttcggcaagcactggcaaccgggcttcggtggcctgtaagcggctggttaagccgcgctgataggcggcctcggctgcgcgctgggtgaagcgcgttgcttctacgcgttcagcctgcatctctcgctcgtcgttgagcgtttgcagacgtgtgccgttgacggcaacgtcacgcaccgcgttcagtactgactggttgtaacgttcaatcatcatgttgctggcggcgcgagtgccttcgagattggcattcaaccgtccaccgtcaaacagcggcaatttcagacccgggatgaagttgaactggcgactggtttttttgaataaggtatccaggtggatggagtccagaccgaaaaacgctttgatatcaaagctcgggtagaacagcgcccgcgcggaatccacctgatctaatgacgcctgaacataccagcgcatggcttgcagatccgggcgtctggcgagcaactcataagagagcgttgccggaatgccggtctgtactcgtggtaatgccaccggtttgatctccggcatatcgctggctcccgcgccaatcaatgcacgcagagattctcgcgtttcagtgatttgccctttgacggcagcaatttgtttatcgaccgccagaatctgtgcccgcgcgccgtggaaaggcacttgcgcttccagaccgtgcgccactttactctggtgcgctttcaccgcgtaatcaatcacatcgcgagtttgttctaacagatcgagcatctgatagctggcctgcatactgtaataaagctgcgctacgcccgtggtcagcgatagctctactgctgcggtttctgccagcgcggcattatgcgcgccaatggcggcagcaaccgctgagcgatgcacaccccacaaatcgagatccagtccggcaaacaaaccgactgtggcttccgtatagtacggcccgtccatacccagtgctggcgcatccatcgcataagggcttaaaaagccgttcgccgagacgcgttggcggttgagcatccctaacgctgcgacctgtaattgtgaaccggcatctaacaaatcggcctgggactgcgctttttcttcccgcagtttcgcttcggcgagggggtgtgaaccacttagcgtccgttggatcagcgaatccagctgcgggtcattgagttgtttccaccactgcgcctgcggccagccggagctggcaagatgaatatcatcggccagtttgatttgctccggtttgagctgttgatgaggcgcagaatccttacgtaccagggcacagccggaaatcagcgtcgtgctgccgagaatgctgcacaacagcagacgtgaaagttgacgattgatcattgcgtggctccttgtgcctgttccgtggcgggcgttaatgccggggctgtccagtctggcaagcgggcgaaaagctggcagacgtgttgctcctgttttaataaggtgggcagaatggcctgcgaggcggatgtctcttctaacgttatttgaggagaatgactgagtgcggtagccacaccggcagcgtatttctccagggcgtcggcaaactgacctgctctgtccggctgtagtgcgttatccagcgcctgcgccgagttccaggtggcatcccaggcgtgaagaatatcgcggccctgacgaataaccgtttgcgaacgttcaatcagtaatgcgcgttcttcgctgtccagttgacgctccagcaccacgcgttggcacatctcttcacaggcattaaacgccgcatgcagacctatgcgaatgtgcagataagtgcgcagagccgtgacttcctgctggcgtgggatccgcattactttactcaacatacccagcgcgccagccagtttttgcggcagcgtgcgcgcttcgctttcaggccagacaaaggtgtaaatcaccgccgacaccacggtaccaatgatgatacccagagcgcgatcgcgaatttccaccaggtcgtacaccgggccaaaaacgttttcgagcgtggcgagcgcgaaggtgaccaccatctgtgtgccgatataagaagagcgttcagagctggtggcaatccatgcgcccaacaggaaaatcggtgccagcacaaacagcaattcgacaatattgtccagccagggcatgaccagtagcgtgaataacagcgccagaatcgcgccgcaaaaggccccaccaaaacgcagcaccatcttctggtacgacgaaccgacatttggattagcgacgatcacgcaggtcagcatacaggtatgaatgccttcccagtccacgccgctgtagaaggtgtaacagatcaaacaggcgagcagcgtttttaccgcgtagcgcatatagtctggattggtaaaagcatcggcgaccattgatggcggtttggctgcgggcgttggcggcgtattcgggtccatctgaccaagctgtaacagcgtctggcagatattctccaggttacattcccgtgccgtcatcgcttcactttcactgatccgccagtcgctttgccagcactgaccttcggtaatggaatgctgcagcttgttgatttctgaagctaatttttgtcggaattcaataattgcctgagaatcagcaaaagaggtgggatcgtagcgattcagtgtcgagtaaatgtaggttaccgttgccacgcagctttgccaccatgcgctctgggttcgccagttggcatcgtccgcgaggcaaaagacattgagtttttgcagcgccagcgcctctctttcaatccgcgtttcgggtagcggtgcgaggctgtccgtcaggtggctaatggcatcatcaagccgatcattaagcgcctgatgcatctgcgtaatggcacgactgggaaaccacagcacgccgattaacgtcatcagcaaggttggatagaggccaacaacgatacaccacagcgttaagcgcacgaccgcttccggatagtcgagcatggcggggaaggtttgcccgtaaatagcgacaatggcgacggcgaaaaagaccagccccaaccgatgggtgcgcatcaaaaacatacagctcatcaggatcggcccggcaatgatcaatcggatcaacggttcgccatatgaccatttgtagatcaaaaacaggctggcgatctccagcaccgtggcgaccacaaacaagatcgccacaaatttggtgtaaaacgcgttcgactgaataccgtaaaacagcactgccagtgataacgccacaaaagggatctcaaaagtcatcgagatcagaatcaccagcaggcagcctacccagagttgcatagtctgtggcacgcgccctggtcgccgctcgcttaactcttcatgaaagaacgccagcagcctgaccaccggtaatggcagggagttgagcgcgctcattattgcggctcaagattagcgactgccgaagcgccgatgcggaacatttccgggtcaggtttatcgaccatgattttgaccggaaaacgctgggcaacgcggacccagttaatagaacgagacactttcggcaggccgcccagcaccaggccgccgtcatccggtagcacgccgtagccaatcgaatccactttaccctcgaaggttttgccgctgtcgctcatcaggcgaatggttgcgggtgtacccgagcgaatatttttcagatcagtttcgcggaagttggcaatcacgtaccagtgacgagtgtcgattagagtgaaaatagggcgcatcgcagatgcaaactgcccgacggaggttttgagggaaatgacccggccatcaaacggcgcgcgaacggtcgccatttccagatgcagtttggtcagggcaatatccgcttccactgccgcacgctgcgccaccagcgcatccacgccgctgacggcgctggcggctgactgcgcctgcaacaatacggcattaaggtccgcttctgccgcacgctgtgcggttcttgcacggtcaacctcttccgcagaaacaaaaccttctcgcagtagcggttcggtacggcgtaacgtatcgctggcttgtttcgcggcggcacgggctttttctaccgtggcattaaccgagtcggcaccaaactgttgtgcgtcaacgctacgctgggtgagcataatttgcttatccagcgccgcgagggaggcttcagctttcgccagattggcttcgtacgggcgcggatcaatgcggaacagcaaatcgccctgtttcaccgcctggttgtcggtgaccgccagttctacaatgcgaccgctgacttccggcaccacatcaatggtatctgctgacgcgtaagcgtcattagttgatggcgcactgtctacgcgccagataacgaaaacaagggcaaccagcgccaacgcaaccactaacagagcagggaatttactgcgaggagcttttttcggcgtactttccatgagcgcgtctcaaatagattagaaaaatgccagccagaacagcatggcgtagagagcaaaaagggcggtataaataattccgacaaatgccagattgatatttgtccgctgaataattcgcctcgtgatgagcgtcaaaataaggctggcaatagcgcagaaaaaccagccgggataataagcgccgatcaccgggatcgccggagataatgagcatcccgataccatgaagacgggaattatccaggctgtctttttgagttgcatcgccatgcgagagagaactgttggcatattaaatacatcctgtctgctgcgaacaatatctgtagtgaatatcaatatccattgaaggcgtcagtatggctattttcttgatgaataaaaatagctttattcagccaccgcattcataacttatatatttcatgtattaatttgctgtatatatttttaaaataaatgcttttgggggcttcagcgcccccaaaagcgagtgacattaatttggggttacgatattcacccacaaatcgaaattatccagacaggcgataatttcttccagtttcgcgccattgccaataattttggctttcttcgctttcaccagatcggccatttttgcctgtccggtcagcacggcgtgcagatcttcacggctgatgtagaaagaggcgtcagcttgcggttgcagtgttttacggtagttaagcacgctatcgttcagcgtcaggttgaggttatcgccgttgctcatattgaagttcaggctgatatttttacccgcggctttcgcgctatcgaggcgaacggacataaagtcgaacagcatttcgaccgacatcccacgaatggtgtccggggaaccggtggtgccgtggctgaacttatgcaccccttcgcgcagctctttcgcgccggtcaggtagaaaccgcgccatgtggcggactcggcctgatagcccagctgttcaaagttattcgcttgcagattcttcgcgacctggtcacccgggttggcagcaatcacctgtttcagcagttctgccgaccagcgataatcaccttgcttgttcgcttcttgcgccaggttgatgacgcgggcagaaccgcccagcgcctgcacgtaacgtttacccatctccacctgaccatacggatgcaggttagccgggttaccgtcgtaatagccaagatagaagttatataccgcgcgggcgttgtggctgacagaaccgtaatagccgcggctggcccagttattggcaagcgcaggcggcagcttaatcatgtcgccgatttcattcatggtgtagccctggttcgccaggtgcagggtctggtcgtgaatgtacttgatagtatcgcgatatttaccaatataatcattgatatgcttattgccccaaaccggccaggtgtgcggcataaacagtacttccgcgtcgttaccccacatatccaatgtttcgttcagatactcggtccacttgctggtgtcgcgggttttcgcgccgcgcagggtgtagaagttgtgcagggtatgcgtggcattctcggcggtacacagggctttcagggccggaatatagaagtgcatttccgctggcgcttcgctacctggggtcatcaggaagtcaaactccaggccgtcgataatcatcttctcgccagttctcacgatagttttagtcggtgcaataatgctcgggtcgcccgttgccagcgtcacgccaaggccattacccacattgccttgcgcgttgtgcggcagtaacagaccgtaagagtagagcgcacggcggctcatgatgttacccgccagcacgttttcgctgatggcttcgtccataaagccagctggagcaatcacctgaacttttccggatttaacatcggcttcagagatgatgcctttcacgccgccatagtggtcggcgtggctgtgggtatagataacggcaataatgggtttttgcgggcgatgctggaagtaaaggtcaagtgcggcttttgcggcaggtggcgtcaccagtgggtcaataacaataatgcctttctcgccctcaacgaacgtaatgttagagatatcctggccgcgcacctgatacattttatcggtgactttgaacaggcctgaaatgccgttgatctgcgactgacgccacaggctggggtttacggtttccggcgcagcggcattaatatcaaatttgtaatcattcgcgcggtagtaaattttaccgttcgcatcacgcagaataccttcatccagcagcggagcgataaatccacgctgggcatcgtcaaaatcctgacgatcgctaaacggtaatgatttggcgtaattctgattaacctgttgggtatattgagtggcggctttcgcttcatctgttgcgtaagcggtatttatcatcatgccgctggcggcagtgaacgcaataacaatcctgctcaaacggaataaccgagagttattcatataaatctccatttatcatttatgtcgtaaatatgtaatccatgcaaaatacgtcatttaaagctggcgttatcataattctgaaattgcgactttaataagtggaagtgtgagcggaacgagccattttattaggcatttgtgctgaagagggaaaattacagtagaactatcattgctgggaataatatgggctgttttatgtaattattatatatattgtacctgtcgttggcacagcgggatattgcgctactgtgccaacgctttactcatgggactttagcacaggactgtagcaaaaaacgttgatgcgccaatattgctgcaccctgagcgccattaaagtcagaagatgaggcggcaataaagcgcacgacctgatacggcagtggacggcgcaggtacttttgggtcatggcaatgagagtctcgcgtgggaaggcgggcatatccatcgcgccaccacccagaatcaccgcatcgggatcgaacagattaatgctggtggcaatggctcgtgccgcgttttcaagcagactctggacgaaaggggcgttttccgcatggacgaaaagatcgctcaatgggtaatttcggggctgttgttcgtaccagcgtcttagcgccattccagagcaattggtttccaggcacccaggattaccacacgcgcagtgttgggtcatatctcccagggggatatggcccagttcgcctgccacaccgtgtgcacccgtccacggcgcaccgttcatccacactgcgaaccccatccccgtaccgagataggctgccagaaccagttgttgcgtaaggcggttttctactacgtcccaggagagttgcaggttaacgtcgcgggaaaactcaaccggacaattcagcgtattttcgagcttatcggcgagatcatataaatctgccgctgttaacggcaggttaggcgtagaaataatggtgcgtttatctttactgaccagcgccggaaatcccatcaccagaccatgacagcgagcgttaaagcgcctgagttgctcgtcaatcatttcgccgatacccgacaccaggtcgggagcaataacttctgcggtccgctttttttcgcagtgtagcgtttcaccttctgctgtccgcagacaaaagcggatatgcgttgcccccatatccacgcccgctacgacgttatgctgtttttgcatgaggctgtacctcgctttttgcagccagaatctgcgcggtcataattctccatgcttcgtcgatattttccgcatgattaaacaggccggaagtgccgacgataaagacatccgcccctgccgccattagtttttcgtaagttgcctggttgcaggaaccgtccacctcaatttcgtactccagaccttctcgttcacgccatgccttcagttcggcaactttatccagcatttcaggaatgaagggttgtccggcaaaaccgggatcgacagtcatgaccgtaattttatcagccttatggatatagtatttcatggcctcaaccggcgtttccggattaagaatcagccccactttcatgccatgacggcggatttcatcaatcaggcggaatgcctgaccgttgatagtttccggatgcaaagtgatgaaatcagctcccgcacgtgccagttgagcaatgtaatcctgcggacgcgttaccatcagatggcagtcgagcggtttactcgccagtttttttacctggcttacgaagaacggtgagagcgtcagattcggcacaaagtggccgtccatgatatcgatgtgaaagtaatcggcatggctgtcgataaattcgatctgttctttaaatttcagcagatccatacacattaacgagggggagattttcatgttcaattccttacttactgataagacggtcaagggcgacagccgcgataattaatccgcccatcaccaccagttggtaataggtttgtacctgcaaaatattcagaccgttgttgatggtgccgatgatcaacccgccaatcaccacagagaaaatgcgccccttgccgccgaagaaactggtgccgccaatgatggcgctggcaatggcataggtttcaaaacccataccggcaagcggttctgcggcaccgagtcgtgcagttgagacgacgcctgccagacctgcacaaacaccggagatgataaacaccaccaggatgtggaatttcacgtcaatcccggaatagaacgccgagtttttgttgccgcccagtgcgtagatgttgcgtccgagccgcatacgcgttgtcagaaaccaaaggatgagcgcgacaattagcgagaagataacggggacaggtatcccaattacgctggcggcaaagaagttcacgaagtcaaatgagaagccgtataccgagttggcatcggagatcaccagcgtgatcccacggaaaatagcgttggtgccaagggtgataatgaacgggtgtagtcccgtccagttgaccaggcagccgttgatcgcccccagtgcgccgccaaccagtacaccgccaattagcgccgcgagaaacggatcaatacctgccaacatcagtttagcggtcaccataccggaaagcgccagaatcgcgccaaccgaaaggtcgataccggcgaccaggatagcgaagaattcccccatgccgatcagtaccgtcacggagctttgcacaaaaatctgggtaatattattggtggtcagaaaatattctgacgacagcaaaccaaaaatggcgacgatgatcgccaggataaaaaaagtaccgtatttatcccagaacagcgcaaagttgaacggtttcttctcgctcgcttcgctttttactcgtgtggtaaagcccatgccataatctcctcttcgctcatgtcatcgcgattggtcaggatttgcgtcagtcgtccttcgcagaacacggcgatgcggtcgcagacggtgataatttcaggtagttcagatgacaccatcaggatgacttttccgtcgtccgccagttggcgcatcactttgtaaatttcggctttcgcgccaacgtcgatgccacgggtaggttcatcgaaaatgatcacttccgggtgacagcacagccatttggagatcaggactttctgctggttaccgccggagagttcagtgatgttctggtttaccgaatgacatttcagcgccagcagttcgcgctgggcttcagcggtacgttgctcgtcaacttcatgaaacaaccccatcgcgcctttatagccgccgtctttcagactgcggctgatagctatgttctgagcgatagaaaagttggggaaaaagccgttatcccggcggctttcagtgatgtaagccatcccttttttcacggcatccaggggagaacgtggagagatatctttgccattaagacggatttctccgccagcgcgtttatcaacgccaaacaggcagttcatcagttcagtacgtccggaaccgaccagtccggcaaagcctaatatttctccccggcagacgctaaatgagatatcccggaccttttttctgtcacggctggtgacgttgcgcacctcaaaaaccgtatcgtgcgcaaggttgctgacattctccttcatcgcgttaaaacggttttgcaattcgcggcctaccatcagacggacgatatcgtcatttgacacatcgctcaccatgccgctgcaaacgctgctgccgtctttcatcaccgtatagcggtcgcaaatacggcgaatttccgccaatttatgcgagatatagacgatggccgtaccctccttacgcaactgattcatgatcagaaacagatagtccacctctttattggtgagtgaggaggtgggttcatccatgatgatgactttggcgtcgagcatcagcgttttggcaatttccagcatctgcttgtggctgatagataaattcgccactttctcatctaaatcaactttcaagcccacgcgtaataacatcatggcggcgcggacacgcatttctcgccagtcgataatattgacgccacagatttttttcgtcagatgacgaccaatatataaattttccagtacggttaattcatcaataacgctgagttcctgataaataatcccgataccgagttgtgccgctaatttatgatccagtttgttatagttaatgttattaatggtaatggtgcctttggtcggctcatgtatcccggataacactttcattagcgtagatttacccgcaccattttctcctagtaatgcatgtatttcaccaggataaaccgttaaattaaccgactttaatgcgtgaaccggaccaaaggacttgccgatccccgccatcgatatatatggcgtggccataaataacctctctgcacgaaatatcgtattattgcctgatggctacgtttatcaggtctacgttcaggttattttgttggccggataagacacttcattagcatcatcatccggcatcattcagttttattgagtgaccaggattgaatcgaccagtttaaattccggtgctttatccagcgggataaccttgccggatttctcagcgtcaaccatcagcttcagacccgttgcaccgatatccgccgggttctgggcaaccgtcgcggtcatttgtccggcttccaccattttgcgggcttccggaatgccatctgtaccgacgaccaacactttgcccgtttttccagcgtttgcgactgcctgagcaacacccattgccatcgtgtcattcgcgcaatagatcgctttaatattcggattacgttgcaacacgttagtggcgacatccagtgctttaatacggtcccagtcggcaggctggctggcgacaagcttgatctggcttgcttttttgaaggcttcggtggcaccattacgacgcgcttcaccggaggcgttaccggctttaccctcaatgattgcgacttcacccccttcggcacccagcttgtcaataatgaatgacgcgcctttcgccccgacggcaacattatcggtggtgacaaaaccttccacattaccgcctgcttttttcagattatccatgtcgattttttcatcgagattgaccagataaatgccttttttccatgcgcgggcaacaggcatgaccaggttcactgaggataatggtgcgaaggcgatacctttgtaatttttattactgagatcttcaaataactgcaattgagattgaaaatcgccttctgaaggagaggcaaaaatatcaacgctgacgcccagcgtttttgcttcatcttcaatgccttttttcatatctacccaaaatggattggagagtgttttcaatacgacggcatattcggcggcagcaaaagcgctggttgacaacattaagcccacgagtgtgccgctgaaatatttcagatatttattcataatcatgttctcacggtaaggggagaggtaactccgcgatggcggaattacctttttcttatttcagcgcgcctggtgagaagaaatcaacaattgcgccggttttttgcatattaatattagcttgttcaatgttgagctgggcgacagagacaaaaaacgcgtccagcaaagtcagttgtaatattcttgccgaggcattacgacctaataacggtgtttccggggccggtgagcaaataatataatcggccagcttcgctattggtgaatgatagctatgcgttatacaaataatctttgccccgttcttttttgccagttctacagccgcttttacatcactggttcgcccggaatgggtcaccaccagcaccacatctccttcctgtaacaacgaagcagacatcatcatgatgtgagcgtccggataggcctggcagcgtacgccaatgcgcaaaaacttgtgctgtacatcagcacagatagcatttgatcctccggcaccgtacaaatcccgctgtctggcctgatagaaaaagcgggcggcacggtggatctcatcaacgttgacgatcgactgaccttccataatggtgcgtaaagtgatgttaaataccttattcaccacatcctgcggcgcttcatcaaaagccaactcggaaggcaatacttgttctgactgagaaaaataatcttccagcgcactgcgtaagttacgaaagccgctaaaccccagcagctttgataccttaacgatcatcgcttcagataccgccagagcttctgcgacatctttaattgcgggtgcacaactcaggttaccgggtttgagtaaccactccacgatgcggctttcgttttctgtcattccttcctgcttcattcgcaggtaaggcgctaacccgataccgttcggaagcgctgaatcaaactctgactggctcatcacgttctcttgtccttgaattgaagacgccactatatcaccacagcaagaacagaaaagatgctggcaacttcacaaaaaaataaaatttataaagtttattttgttgtgaataatggagagtggcttaaaatttcgtttcatttaatcactttaaaaacatgatgttatttgtctttctggtttattagatgatagatgttgctggatagtgagtgtctttaacgctattgcgctgccagatgtaactctgtaaaacagatcgggaaggcggatttcatcgattttggatgtttttaattcatttacatcacaaatgttttttgattgtgaagttttgcacgggcggggaagatgaatgaaaaagattgcatttggctgtgatcatgtcggtttcattttaaaacatgaaatagtggcacatttagttgagcgtggcgttgaagtgattgataaaggaacctggtcgtcagagcgtactgattatccgcattacgccagtcaagtcgcactggccgttgctggcggagaggctgatggcgggattttgatttgtggcactggcgtcggtatttcgatagcggcgaacaagtttgccggaattcgcgcggtcgtttgtagcgaaccttattccgcgcaactttcgcggcagcataacgataccaacgtgctggcttttggttcacgagtggttggcctcgaactggcaaaaatgattgtcgatgcgtggctgggcgcacagtacgaaggcggtcgtcatcaacaacgcgtggaggcgattacggcaatagagcagcaaaggaattgagattcatccactacttgcatggatgagtaatgactaatgtggatagagtttctttttgaggttggctaatgaaacgctttccgctatttcttttattcaccctgctcacgctgtccaccgttccggcccaggccgatattatcgacgacaccattggcaatattcagcaggcgattaacgacgcttataaccctgaccgtgggcgagactatgaagattcgcgcgacgacggctggcagcgtgaagtgagcgacgatcggcgcagacaatatgatgaccgccgccgccagtttgaagatcgccgcaggcagctggacgatcgccagcgccagcttgatcaggagcgtcggcaactggaagatgaagagcggagaatggaagatgagtatgggcgttgatataggggccggcgcgggtattttccctcacgccacctcaatctccatcccatcaaaccccgcctcaaaccccgatggtagcgcgttttccatcagccacgcatcaaactgatggctgatatgggtcagaatcacccgtggcgagcggataacctgattcagcgcaagcacggtatttaaatcacagtgattacgcggtgcatcctcgcgcggtgggtggctgcaatcaatcaccattacctgtggctgattattgcgtaaaaatttcagcgttttttccggcaggcctgcagtgtcagacagccacgccacccggctatgtgccgtttccagtagatagccgaaagtgagtttcgaatggttaagcggcagcggcgtgacctgcaacccctgcaaatcaaacaccacaaacggctccaccgtgtggctgaaatcaagcaggcccggatgtttaaacagatcgtcgcagccctgctcatccggtggaccgtagaccgggattgtgtcgcccacgccccagcgcagcgggaacagcccctggacgtgatccatatggtagtgcgtcagcaaaaactgctggaacgatccgggcgaccagcgatcggcgagatcgtgcagcccggcgtcgatcagggtgatcgcgtcgttaaacttcacgacgccgctgcatggctggcggcgatactgcggcgagcgtcgcgctctggcgcaggccgcgcactcgcagccccatgccggaacgccctgtgcgccgccggtgccggtgagcgtgagggtcaggctcatgttacagcgccttggtgaagcggaagtggctctgctcgtagccttcgcgcaggtaaaatcggtgcgcgtcgtggcgcttcacgttggtggaaagctcggtcatttcggccccggcctggcgggcttcttcttctgcccatgccagtaatttactgccgacgttcagaccgcgcgcctgcggcatcaccaccagttcctgaatttcgccgatccagttgacatgatgcagatgaaactgcaaatgcaggccgatcatgccgacaacttcgccatccagcagcgccagatggtagcgcatgttcggatcgcgcagattggcgttaaaccccacgcgaaacgcctggtggtcaaactccgcctgttttagctcacaaatcagcgcgtaaactgcgtcggtgtcgtactgcgtagccgggcgaagctcacaagcaggcatggtgtttctccttctgatgaatcagcgtcagcaacttgtcgaccgactggcgcaggctgccgtcattattgagcgtaagacaatcctgaggagtatagcgggcagcgcgcgccagccgggcgttaatttcactggcattttcacgaccacggttttccaggcgctggcgcaggatctctggcgaaacctgtaaacaaacgggcagcagcgccgattgatagcgcgcccgcgcctgcggcagatgggcgcgtgagccgttgaccaccacgtcaaatccagcgtgcagccagaggtcaatctcgacgccgacgccataatacagaccgttagcgtgccagcttaaggccagaaggttctgccccgcgcgggtaaaaaactcctgctcgctcagggcgatatggttttcacttccggcgctggcggcgcgcgtgatgtagcgatgcgctaccagtagctgagtttgttcccgctggcggagttccgtcaacagactgtcttttccggagccagaggcccccattaaccaaatcagttttcccgtcatcagaacacccttttaccctgacgccagacgtggtcgatatgaatgtggttgcccttgcgatgcgccagcaccaggtcggcgcgtttgccctcgccaatcaccccgcgatcctgaagattaagcgcctgcgccggatttttagtcaccagcttcaccgcctgcggcagcgtaaagcggttgctctcgtcatcggcgacgcgaaatgccgcatcgagcaggctggcggggtagtagtcggaagagaggatatccagcaggccaagctgcgccagttcactggccgccacgttgccggagtgcgaaccgccgcgcacgatattcggcgcgcccatcagcacgttcatgccatgcttgcgcgaggcttctgccgcttcgaacgtggtgggaaattcggcgatcacgctgccaagctgatgggattgggctacgtgggcgtgcgtggcgtcatcgtggctggcgagcgcaatgtgtcgcgcgcggcacattgcggcgatggattcgcgattcggctgtgaccagcgtgcggcgagcgccagttgctcctcttcgtactgttgcatctgcgcatcggtgagcgagtatttgccctgataatattcacgatatttttcgcggttggcgaactggcgctggcccggtgagtgatccatcagcgacaccagcgttaccggttcgcgctgtaccagtttttcaaacagcggcagcgtggtgtgatgcggcagttcgcagcgcagatgcagacggtgctcggcacggttgacgccgcgtttctgcgtctcttcgatggcgttgatcatcttctccagattctccagccgatcgccgccgtcgcgtacatcaccaatcgccacggcgtccagcacggtggtgatgccgctcgccaccatcagcgcgtcgtggctgctcatcgccgagtgggcaggccagtcaactttcgggcgcggggtgaagaatttatccagattatcggtatgcagctcaatcagccccggtagcagccagccgccttcgccgtccattgcttctgacaggtgactctggctttcggcaaaggcgcggatttcgccgtcctgcatctccagagaaccgtgtaccacctcgttttccagcaccagtttgatgttattgataatcatgaagagactcccattgggtgcaggcggtcggcgacttgctcgcgtacggtttcgtcatggaagataccgacgatggccgcgccgcgggctttggcttcgcggatcagttccactacggcggcgctgtttttagcgtccagcgaggcggtgggttcatccagcagcagaatcggatagtcgacgataaaaccgcgcgcgatgttgacacgctgctgttcgccaccggagaaggtcgatggcgcaaggtgccacaggcgttcaggcacgttcaggcgggtgaggagacgcgcggctttagcggcgcaggcttcacgcggtacgccggtatcgagcagcggctgcatcaccacttccagtgccgaaatacgtgggatgacgcgcagaaactggcttacccagccgacagtggttttgcggatctccaccactttgcgcgctggcgcggtgaccaggtcgacccattcatcaccgtgtttgatctggatttgcccttcgtcgggtagatagttggcatacagcgagcgtagcagagttgattttccactgccggaatggccgtggagtaccacgcattcgccggcgttgacggtgagtgaggcgccttgtaatacaggcaggcgcacgccgttttgctggtgcaggatgaaggttttactgacgttttgtacgttaatcatttttcgcctcgtggttcgggtgtcggatgcgacgctgatgcgtcttatccgacctacggggagcgcatttgtaggccggataaggcgtttacgccgcatccggcaccagctcaattctgcaaaaccgatgacaccagcaactgggtatacggatggtgcgggtcgtcgagcacccggtcggttaacccactctccaccactttcccttgcttcattaccagcaaacggtccgccagcagacgggcgacgcctaaatcgtgggtgacaatcaccaccgccaggttaagctccatcaccagaccgcggagcaggtccagcaggcgcgcctgtaccgacacatccagcccgccagtgggttcatccataaacaccagcttcggatgcgtcaccaggttgcgggcaatctgcaaacgttgctgcatgccgccggaaaaggtggtcggcaggtcgtcgatccggttggcgggaatctccacctcttccagccatttctgcgcggtggcgcgaatatcgccgtaatgacgcgctccggttgccatcaaccgttcgccgatattgccgcctgccgacacctggcggcgcaggccgtcaagcggatgctgatgcaccacaccccattcggtgcgcagcaggcgacggcggtcggcctcgctcatcgcgtacagcgaacggttctcgtagcgaatttccccttgctgtggtgtcaggcgggcggaaattgatttcagtagcgtggtcttcccggaaccggactccccaacaatgcccagaacttctcccggccataaatcaaaagagacatcgctgaagcctttgcccggggcataaaggtgggtcaggttattgaccgaaagtaacggttgattcattggcttttggcctcgttctgttggcggcaataatcggtatcggagcagacaaacatgcggtttccggcgtcatccagcaccacttcgtcgaggtaactgtgggtcgatccgcagatggcgcatggttcatcccactgctggacggtgaacggatgatcatcgaaatcgaggctttccacgtgggtaaacggtggcacggcatagatgcgcttctcgcgccccgcgccaaacagttgcagggcgggcatcatgtccattttcgggttatcgaatttcgggatcggcgacgggtccattacgtagcgcccgttcaccttcaccggataggcgtaggtggtggcgatatgaccgaagcgggcgatatcttcatacagtttcacctgcatcacgccgtactcctccagcgcgtgcatggtgcgcgtttccgtctctcgcggctcaataaagcgcagcggttcggggatcggcacctggaagataatgatctgatcttcggtcagcggcgtttcgggtatgcggtgacgcgtctggataagtgtcgcatcgtccgtgcgctcggtggtgttcaccccggtcacgcgcttaaagaagttacgaatcgacacggcgttggtggtgtcgtctgcgccctggtcaatcaccttcaacacgtcgctttcgccaatcacgctggcggtgagctgaatgccgccggttccccagccgtagggcatcggcatctcgcgtccgccaaacggcacctgataaccggggattgccaccgcttttaagatggcgcggcggatcatgcgtttggtctgctcgtcgaggtaggcaaagttgtagccgctcagattagccatggttctgctcctgttgcagacgtttgagtagctccagttcggcctggaaatcgacgtagtgcgggagtttgaggtgcgagacaaagcctgcggcttcgacgttgtcggcatgggccagcacgaactcttcatcctgtgccggacctgttgcgtgctcgccgtattccggtgcctgcaacgcacggtcaaccagcgccatcgccattgctttgcgctcgctcatgccgaacaccagcccatagccgcgtgtaaaatgcggtggttcatccggcgggtcgataaaaccgttgaccatttcacattcggtcatcagcagttcgccgacgttcaccgcaaatcccagctcttccggcacaatcgacacgtcgatatagccgctgcggatttcgcctgcgaacggatgattgcgtccgtaaccacgctgggtggagtaggccagcgccagcaaatagccttcgtcgccgcgcattaattgttgcaggcgggaggagcgtgagcaggggtaaaccggcggcgtgcgggtgatgtcgtccggctgtgcgccgctatcttcttcaaacttcgccagcccctgacgcgccagcaggctgaaaacgtgcggcgacggctgttgttcgctgtcggctgtggtcagcgtcggcgtttcgccgtttgccagcagggtgaaatcgagcaggcgatgggtgtagtcgtaggtggggccaagcagttggccgccgggaatgtctttataaattgctgaaatacgccgttcgagacgcatcccggtggtgtcgagcggctcactgaccgccagcttcgccagcgtggtgcggtaggcgcgcaacaggaaaatcgcttcgacgttatcgccgctggcctgtttcagcgccagcgcggccagctcgcggtcggcaataccgccttcggtcatcacgcgatctaccgcgaggttaagctgctgttcaatctgggcgacgctcagttcaggcaaatcagtatcgccccggcgtcggctctcttgcagggcgtgggcggcgtcgatcgccttttcgccccctttcacggcaacgtacatcagcacacctccacatgagtggttcgcggaatagccagcaggcgctcgccgcaggtcaggatcaggtcgatgccgagcgggaacgggtgcgggcgctcggtaagttcatgaagaatgcactttggcagttgcggggcgatcatccgttcttcggcaatacctgcgccggtgaggcgcaacatacgcccaccgctcaggctggtgacctgtaaaatcagcgttgcgcccgcttctggtgcaacggcagtgccggtggaaagggcgttgagctgctcgctggagatcgcctcatctgttaccgcgaaggtcgcctgtttcggctgattaaccagcggcgcgttggtatgaaaacgcaggctctgattgacgatatcgttgctcaatggtgcggcaagccacaccggcgtgtcgttatcggccagcgtcagcagcacgctggtggtggcgatattcagcggctgccagccgcgcttgagctgatgcagggcgacaatcacgcccggctcgctcatggcctttaacaggcgacgaaaactgtgctgggcatcctgcacgggaagcataaaagcggtttccagggtcatgcgttgtctccgcgaaccatcgtaaagaagtcgacccggctggcgttcacttcggcctgacgcgcggcaatgcgtgccatacggtcagcgtccagcggggtaataagggtttctgataagttttgaaagtggcggttttgctgcatcagcgcatcaatcagcgcacaacgttcggcgtgctgtttgtcgcgccccagcacccagctatagccgagcgtgccgtcagtcagacgcacggcggcgcgggtgagcgtggcgtcgccagcaaaaaagcgttcgccggtgccgcccattcgcgcctgaatctgcaccaggccagtttcagcggcgcggatcacctcataatcggcgttgatgttcagcgcgttcaggcgggctgccagttcagccggttggctgtgcgccagcacggacatccagtgctggcgggtcgcggtatctgcgtgcattcagtgctccatagtgaattcaatcatgtcggcgcgcgtcaggctgacggagtactccgccgggctgctttcaccgtcacggtggttaagggtgcgcacgcacagcagcggcgacagattcgggatttcaagacgctggcactctttggcctgggcgcggcgggcgctgatccgcgtctggctgcgtcgtagcgtaatccccgtttgctcgcgcagaaaatcgtgcagcgaaccgctgtcgaaacgttgcagcgtcggccagagggtgaggtccgcaaagtagtggtcgattaaacagagcgcgacgccgttgacccgacgcagggtgcgcaggtggatgacgttctccccctcggttatccccagcgcgtcagcgacgtgaccggaggcggggcgcagcaccgatagcaatttttcgctggtgggatggctgccctggtccagcaggttctggctaaaacgcgcctgggcgttgagcgggtaatcgaacgggcgcatcagcaccagtacgccgacgccctgacggcgctgtacccagcctttttccaccagttggtcgatggcgcggcgcagggtgtggcggttcacctcaaagcgcgccgccagttgctgctcggcgggaagatagtcgccgcagcggtagtgttgacgaagctcctgctcaagttttgcggctatctcctgatagcgtgttgggtagctggtcggatgtgtagacaagtgcatagatatcaatgcctcgctaatcagataaagtgcttacgcaaccgttgagagaggaaatccagcaggctgaccgtgacgataatcagcaccatcagggcgcaggtttgctggaactggaaaccgcgaatcgcttcccacagcgtgacgccaattccgcccgcaccaaccataccgacgacggtcgccgagcggacgttggattcgaagcgatagagagagtaggagatcagcagcggcatgacctgcggtagtacgccgtaaaggatctcttccagcttgttggcaccggtggcgcgaatgccctccaccgggccgggttcaatcgcttctaccgcttcggaaagcagtttggaaagtacaccggtggtgtggataaacagcgccagcacgccagcgaacgggccgaggccgacggcgaccacgaacagcatggcgaagaccatttcgttaatggcacggcaggcgtccatcaggcggcgtacaggttggtagacccaccacggtaccaggttttcagcgctcatcaggccgaaggggatggagagaaccaccgccagcgcggtgccccagacggcgatttgcagcgtgacggccatttcggtgaggtaatcctgccactggctgaaatcgggcgggaagaagtcggcggcgaacgtcgccatgttgccgccatctttaatcagcgtaagcggggccatttccgcgccctgccacgagacgaccagcacggcgataacaacggcccagctcagaagcgagaaccagctgcgcttgggtggggcgatggtgatggtttgcatgtttggctccggtctgtaggccggataaggtgcttgcaccgcatccggcatcaacgtctgcacattgtcggatgcgacgccggggcgtcttatccgacctacgatttactgcaccgctttactcaccgaactcattgcgcttaacgcgttgttcaggcggtccaaatcatccagttgcgcctgaatggcggtggtttttgccagcttgtcctgttcgttcagccctttgttgtccttcacgctttgcatctctttaaacagtgcgagctggcgaatcggcaccagttgcaagtcgctggaggcgcggaacggcgcccagcccaggcgcttcagcaccgctttctcttccggcgttttgccgtaattcataaagaagtcgtagatcttgtctttagtggtttcggaaagatttttgcgccagacgatcggatcgccagggatcagcggtgatttccagatcaccttcagttctttcagcttctccggcgcggaggttttcagcttgtcgaggttttcggtgttgttggtggcgacatccacttgcttgttagcgacggcgagggcgttggtttcatgcccggcgttgacggtgcgcttaaagtcgctggcggagatattgtttttagcgaagacgtagtaaccggggacgaggaagccggaggtagagttaggatcgccattgccgaaggtgagatctttccgcttcgccagcagatcgttcaggttgttgatcgggctatctttgttgacgatcaacacgctccagtaacccggcgatccatccgccgcgaccgtctgggcgaagacctgaccgttggcgcgatccaccgcttccatcgccgacaggttgccgtaccaggcgatatccactttattgaagcgcatcccctggataatgcccgcgtagtccggggcaaagaaggcgttgacctttacgcccagcttcttctccatatcctgtaagaacggcgtccattgcggtttcaggttttgctgtgattccgttgaaataatgccgaaattcagcgccttttcctgctcttcggcgtatgccggatttaacagggtgctgaggctgaacatgctggtgaaggccagcgaggcaattatcttagcgttcattcgttttcctcaatgatggggatgtcaggcagctttcgcgttctcttcgacgcggttaatgctgcggtagagatggtcaaaacgttcgttatcaaacagttggctgcagccgtcgtagaagacgtgcccctggcgcagggcgacgatgcgttcgcagtagcgcagggcgtaatccacctgatgcagcgtgacgaccacggtaatgccgtcgttctggttgatgtcgcgcagggtgtccatcacgatgcgtgccgattccgggtccagcgaggcgatgggttcgtcagcgagaatgaccttcgcctgctgcatcagcgcgcgggcaatcgccacacgctgttgctggccgccggagagtgtggaaacacgttgatgggcaaagtgcaccatgccaacgcgggtcagcgcctgtaacgcgcgctgtttctgctcgcgggtgaagtagctaaaacaggttcgccagaatggcgtgctgccgagcgcgccaatcagcacgttctccagtacgctcaggcgattcaccaggttgaactgttgaaagatgtagccggtatgggcgcggcttttgcggatatcgcgggccagacggccttcgcgctggacagtgcggcccagcagctcgatatggctaccgacagatttatcgccggtaatcaaaccgcttaagtgacgtaaaagagtggattttccggaacccgacggcccaagcagagccaccatttcaccatgatgaatgttcagatcaaccgcgtgcagcgcctgatgctgattgaaggttttggcgagcttctcgacacggataatcgtttgcatgatgcagcctccctaaaaaagtggctccatcgtggcggattattgtgacgatttggttaattaaaagtgactaacagatgaagagttaacgggaattcgatgacagtgcgggagggcgggcctcccggcgggttattgcgttggctgttgtttgatgacattaatcatccacggtacgccaaatttatcggtgactttgccaaagccatgcgcccagaacgtttcctgccaggccatttcgatttttccgttggcggcaaggttatcaaaccagcgttttccttcttccacctgttgagaatcgagcaccagcgtaaagccggagtagctggcttttcctgacggtatagcatcgctcatcatgatgtcgcttccggcaatgcgcacgttggcatgcgcgatggcggtatcgggaaattgcattccggaagggcagttttcggcgctgtcctgcgctgatttcggcatttcgccgaagctgattttatagagcagttccgcgcccaacgtacgttgataataggcaatcgcgtcggaacagttaccggcaaaagagaggtagggacttaacggcatgatggtgacctcagttaagagaagcccgttaagtgtagttcgaaatttatacagatgagagggaagcctgataagacgcggtcagcgtcgcatcaggcagtcggcatcgttgccggatgcggcgcgagcgccttatccggcttaccgatcacaatacaatcagttctttttcacaaactcagatttcagtttcatcggaccaaaaccgtcgattttgcaatcgatgttatggtcgccttcaaccaggcggatgtttttcactttggtgccaattttcagcatcgaagagctacctttcaccttcagatctttaatgatggtcacgctgtcgccgtcagccagcagattgccgttagcatctttaacgatcagctcgtcgctttcctgtgcaggttctgcgtcgttccattcgtaggcacattccgggcagatgtacatgccgttatcttcgtaggtgtattcggagttgcattttgggcagtgtggtaatgacatgtggatttcctcaaaagtcagcagggcaaaagcgccaaaaaacggcagattgccgaaaaaggccgcaattatacacaaaatccctgagtttgtcgggggtactgctgattttagacgacgatcgttttcatttgaaaggaaacgcaaaaagaaaataatctttttgcctccatttattatttaagataaggttaatgttctacttgttctttttttaattcaaatgatattttttatctttctgacgttttaaacgtatcggaagacgttatttattctaataaaaaataacactctaaatataaaattatttcttgcagtaattataaaagccgaaaacagaactcaaaagcaatctggctaaataaaagtaataaaatttgctttaaggaagaattttctatgtacacacagaccctgtatgagttaagtcaggaggctgaacgcctgttacagctttctcgccaacagttgcagttactggaaaaaatgcctctctctgtacccggagacgatgcgccacaactggctttaccctggagtcagcctaatatcgccgaacgtcacgcgatgctgaataatgagttgcgtaaaatttcccagctggaaatggtgctggcgattgtcggtaccatgaaagcagggaaatcaaccaccattaatgccattgttggtacggaggttctgcctaatcgcaatcgcccaatgactgcgctgccaacgcttattcgccatacgcccgggcaaaaagaaccggtactgcatttttcacatgtcgcgccaatcgaccatttaattcaacaattacaacagcgcctgcgtgattgcgatattaagcatctgaccgatgtgctggaaatagataaagatatgcgtgcgcttatgcagcggatcgaaaatggcatcgctttcgaaaaatattatctgggtgctcaacctatttttcattgtctgaaaagtttgaatgatttggtgcgactggcgaaggcgctggacgtcgattttcctttttctgcttacgccgccattgagcatattcccgtgattgaagtggagtttgtccatctggcggggctggagagttatcccggtcagttgacgttactggatacccccgggccaaatgaagccgggcaaccgcatctgcaaaaaatgcttaaccagcagctggcacgcgcctcggcggtactggcggtgctggattatacgcaactgaaatcgatctccgatgaagaggtccgtgaggcaattttggcggtggggcaatcggtgccgttgtatgtgctggtcaataagttcgatcaacaggatcgtaacagtgacgacgctgaccaggtgcgggcactgatttccgggacgctgatgaaaggctgtattacgccacagcagatatttccggtgtcgtcgatgtggggctacctggcgaatcgggcgcgccatgagttagccaacaacggtaagttacccgcgccagagcaacaacgctgggtggaagattttgcccatgccgcgctcggcaggcgctggcgtcatgccgatctggcggacctcgaacatattcgccatgctgccgatcagttgtgggaagattcgctgttcgcccagccaattcaggcgttgctttatgccgcttacgctaacgcctcgttgtatgctctgcgatctgccgcgcataaactgttgaattacgcgcagcaggcgcgggaatacctggattttcgtgcgcacgggttaaacgtcgcttgtgaacaattgcagcaaaatatccatcaggtcgaagaaagtttgcagctattgcaactcaatcaggcgcaggtgagcggcgagattaaacatgaaatcgagttggccctgacctccaccaaccactttctgcgtcaacagcaagatgcggtgaatgcgcagttagccgcgttgtttcaggatgactcggagtcgttaagtgagatgcgtacctgctgtgagacactgttacagacggcgcagaacaccatcagtcgcgactttacgctgcgctttgccgagcttgagtccaccctttgccgggtgttaaccgatgttattcgccccattgagcaacaagtcaaaatggaattgagtgagtctgggtttcgtcctgggtttcattttcctgtttttcacggcgtagttccccacttcaacacccgccagctgttcagtgaagtcatttcgcgccaggcagcaacggacgagcagagcacgcgtttaggcgttgtgcgtgagattttttcgcgctggttgaatcagcccgactggggacggggaaatgagaaattcccgacagagacggttgattacagtgtgttgcagcgagcattaagcgcagaagtcgatctttattgccaacaaatggctaaagttctggcagagcaggtcgatgaatctgttacggcaggcatgaatacttttttcgctgagttcgcttcatgtttgacggaattacagacgcgtttacgcgaaagtatggctctgcgtcaacaaaatgaatcggtggtcaggctgatgcaacagcaattgcagcagactgtgatgactcacggctggatttacaccgacgctcagctgttacgcgatgatattcaaacacttttcacggcagaacgatattgaccaagacgttactggacggccccggtcgcgtgctggagtcggttcatccgcgctttttagtggatctggcgcagggcgatgatgcccgccttccacaagcccatcagcagcagtttcgtgaacgactgatgcaggaacttcttgcgcgcgtgcagcttcagacatggacgaacggcggcatgttaaatgcgccgcttagtctgcgtctgacattggtggagaaactggcgtcgatgctggatcccggtcatctggcgctgacgcagatcgcgcagcatctggcgctgctgcaaaaaatggatcaccgccagcactctgctttcccggagctcccccagcaaattgtcgccttgtatgagtggttttcagcccgttgtcgctggaaggaaaaggcgttaacgcaacgaggcctattggtgcaggcgggtgaacagagcgagcaaatttttacccgctggcgtgctggggcgtataacgcctggtcgttgcctgggcgctgctttatcgttctggaggagttgcgctggggtgcatttggcgatgcctgccgtctgggaagaccgcaagcggtggcgttgttgctgggtgatttgcgcgtgaaagcgacacaacatttggcagagagtatcaatgcggccccgaccacgcgtcactattaccatcagtggtttgcctcttcgaccgtttcgacgggcggggatcatgctgattttttaagttggctgggaaagtggtccacggcagataaacaacccgtttgctggtcagtgacccaacgctggcgaactgtcgcactggggatgccacgactctgttcagcgcagcgtctggcgggggcaatggtcgaggaaatcttctctgtaaatttggtgtaaataatcagttacaccaatgagtcctaaacgaaatacatgtgtgaagttgatcacaaatttaaacactggtagggtaaaaaggtcattaactgcccaattcaggcgtcaactggtttgattgtacattccttaaccggagggtgtaagcaaacccgctacgcttgttacagagattgcatcctgcaattcccgctccccttttgcggccgtcgcgctgatttttctggcgtttgcggaaatgggccaactctgcgaggaaagctatgctgaaaaggaaaaaagtaaaaccgattacccttcgtgatgtcaccattattgatgatggtaaactgcgtaaagccattaccgcagcatcactgggtaatgcaatggaatggttcgattttggtgtttatggttttgttgcttacgcattaggtaaagtttttttcccgggggctgaccccagcgtgcagatggttgctgcactcgccactttctccgttccctttctgattcgaccgcttggcgggctcttctttggtatgttgggcgataaatatggtcgccagaagatcctcgctatcactattgtgattatgtcgatcagtacgttctgtattggcttaataccgtcctacgacacgattggtatttgggcaccgattctgctgttgatctgtaagatggcacaaggtttctcggtcggcggtgaatataccggggcgtcaatatttgttgcggaatactcccctgaccgtaaacgtggctttatgggcagctggctggactttggttctattgccgggtttgtgctgggagctggcgtagtggtgttaatttcgaccattgtcggcgaagagaacttcctcgattggggctggcgtattccgttctttatcgctctgccgttagggattatcgggctttacctgcgccatgcgctggaagagactccggcgttccagcagcatgtcgataaactggaacagggcgaccgcgaaggtttgcaggatggcccgaaagtctcgtttaaagagattgccaccaaacactggcgcagcctgttgacatgtattggtctggtaattgccaccaacgtgacttactacatgttgctgacctatatgccgagttatttgtcgcataacctgcattactccgaagaccacggggtgctgattattatcgccattatgatcggtatgctgtttgttcaaccggtgatgggcttgctgagtgaccgttttggccgtcgtccgtttgtgcttcttggtagtgttgcactgtttgtgttggcgatcccggcgtttattctgattaacagtaacgtcatcggcctgatttttgccggcttactgatgctggcggtgatccttaactgctttacgggcgttatggcttctaccttgcctgcgatgttcccgacgcatatccgttacagcgcgctggcggcggcatttaatatttcggtgctggttgccggtctgacgccaacactggcggcctggctggtcgaaagctcgcagaatctgatgatgcctgcctattacctgatggtagtggcggtggttggtttaatcaccggcgtaaccatgaaagagacggcgaatcgaccgttgaaaggtgcgacaccagcggcgtcagatatacaggaagcgaaggaaattctcgtcgagcattacgataatatcgagcagaaaatcgatgatattgaccacgagattgccgatttgcaggcgaaacgtacccgcctggtgcagcaacatccgcgaattgatgaataagctgaaacggatggcctgatgtgacgctgtcttatcaggtcaattgaactcttaaggttcacttaatctctgacgcgcatactctcctccaggttaacggaggagagtgcaatgaaaaaccgtgtttatgaaagtttaactaccgtgttcagcgtgctggtggtcagcagctttctttatatctggtttgccacgtactgatcttttttcagccgtatccaggcccgcgtgccggaagtctcttgccggttttgcaggaaaaactgcccgtgatgcaactgtgtaatgcggctgacaatacttaaccccagaccaatcccgccataacggctgtccattcgtacaaacgctttactcaactccccgcatttactctcatcaatacccggtccttcatcttcaacggccatgaccgctccgccatcttcttgcagcttaatcataatgttgctgccttgtgggctataacgatgggcgttttctaccaggtttcgcaataacatccgcagcagggttgcatcaccctgaacggtgatgtcggcggcgctctctggcaatagcagggtttgctggcgctggtcgagcatggtactgagttcgtcatacgaggggagaatgacatcttccagcagttttacatgttgataattaccggaagaaaatgactgtccggcacgcgccagttgcagcagctgggagacgctctccatcatctgatcaagtcgtgccactaacggtgctacatcaatgtgatgcgttttcgccagcagttccagatgcaaacgcacccccgccagtggcgttcgcagttcgtgcgcgacgtcagcggtaaacaacctttcattatcgagcgtgctggtcaggcgactgaccagatcgtttaacgccgaaaccaccgcatcgatttcgagggtggcgctatgaatggcaatgggcgttaagttgtcggcggtgcgcgcttccagctctttttgcagctccgccagcggtcgggtgatgcggcgtaccgcctgatagcagataaatagcgtcaggctaaccataaagacgccggggacaatcaggctggcgaccgcctcgcggatctcacgcatgatgtggcgatcgttgttgcgattgtcgcgtagcgcctgctcaaacagctgaatctgctcggtactttcatgccatagccagaagacgctgatcagctcaaacaccaacaaaatggccccgatggtcaatatcagccgttggcgcagcgatattggtcggcgcagaaaacgcatcagattcaattagttttcctcatttgcgaccagcatatagccaaatccgcgcacggtgcggatacgggctttgcccactttgtcgcgcaggttatggatatgcacttccagggtgttggtcgagggctcgttgtcccagttgtagatatcgttgtagagaatttcccgatgcaccgggctgcctgctttaagcatcaggcgcgacagcagagcatattctttgggcgtcagaatcagttcttctccgctcatccatacctggcggcgacccatattcagcgtcaggttgccaacgttcagctcactttcgccctgattattatggcgtcgtagcagggcgcggatacgggcgtgcaactcttccagcgcaaaaggcttcaccagataatcgtcggccccgacatccagcccggcgattttgtcggtaagggtatcgcgggcggtgagaattaacaccggcagagtgtattttttctgccggatacgggcaagaaaatgcagcccatcttcatcgggtaagcctaaatccagtaccaccaggctgtaatgaccggcctcaaggctttgttccgccatccgcgcggtgctcacgccatcgcacgcgtagccttcggtttgcgccgccagaatcaatccctgcaataacagcgtatcgtcttcaacaatcagaattttcattcactcactctcctgcaagtttgcagaatatcatccgcagcctggtaatacttcgtctcaacgccagtcaggcccaataaggttgagaataaattgtcttgtgaatagtgttgcgtttgcgcctgtttttgcaggcagttctggtcaacctgataccgtttttgataatcctccgatagccacagcagcatcggcacctgtttttggctatccggggcgatggcataaggcagaccgtgcagatagatgccattttcacctaacgattcaccgtggtcagaaagataaaccaggctggtggtaaatttatcctgatgttctttcagcagattaatcgctttatcaacaatatagtcgacgtaaaccagcgtgttgtcgtaagtgttcaccagttgctctttggtacaggtctggatctcgttagtgtcgcaggttggggtaaatttcctgaactgcggcggatagcggttgtaataggtcgggccgtggctgccgatagtgtgtaatacaatgaggccatcgctttgcagattattgatgtactcttccagcccgtggaacagcacttcgtcatagcattcgccgttgatgcactgaccaggcaggttcagcgcggtgatgttctggtgaggtacgcgatcgcaaacgcctttacagccgccatcgttgtcattccacagcacgttgatgcccgctcgctgaatgatatccagcacgccttcctggtgctgtgccagctcttctttgtagtgctcacgcggcatatccgagaacatgcacggcactgagacggctgttgctgtgccgcaagaggcggtattagggaaatagaccacgttatcttttgccagccgcgggttagtttcacgctggtaaccgttgagggagaagttctccgcccgcgaggtttcgccgacgatcaaaatggtcaggtttttacgtttcccattttgcattaatgggttgcggtgagcatcttcaccaatgcgtatcagtggcaggttggctgaccgctggtgagagtaccacgaccagctagcaacaatgctgttggacgggcttaaggatttcaccagctctttgttgttgcgaaacagcgaggcatagtctttgtagaacagtgcggcaaccagcagaatcagcagcacagaaatcaggatgttggccccgcggaaaagaacgctgcgcaggcgtgaggtggtgggtttgattttgatccagcaggcaataatcgcggccaacacgccacttaaccccagcgttaataacattcgtggcgtcatcaacgcataactttccgccggcgtagtatcaatgatattggtgatcattgaacggtcgatgacgatgccataggtcatgatgaaatattgtgcagccgcaccgaccagaataaacaggcaggcgagtggacgattaagccataagaaagagcctagtgtcaggacaatattaatcacgctgaatgcgacgaccggcatcgacaagaaaaccagcacgttatgcagtgaatccagcggtaacacctgtagcacctgtttaaaaaaggcgatattcaggcagactgagatataaaaagtagcaagtaataaccaggagaataaatttaaagagggtctttttagtaggcgcttcaacatcacggtgtttccatcgaacaaagtgcgcatatgctcgcaaagcaaaattaagccaaccttaagttcttaaggttggcttttatgtttgcttgattaaggggaattaatctttgcttattggtgcatctaagggatacgggtttttatgcagccggttgtaattcagcgcatacatggcggtgattaccatcagagtgacaaatgaccacataacctctttcgcgccggaccctactacggcccagatgcagtagaggaaggcaatggtagtaactgccaggtatgccgggcgtgctttaccaaagtgaccgtggccgagcagtagtaacgctgcacaggtgtaaagatatggcaccagtgtaaagatgaccgacacggaagaaaccagaccgaattctttggtcgcgtttggcgaaatgctactgagctggaagatggtcatcaaaataccgacgataatcagccccgccactggcgtgcccgctttatttacacgggcaaaaatcggtggaaacagtccgtcatcggcagcggctttcgccgtttgacccgccagcaacgtccagccgcccagtgaacctaagcaacccgcagctgcgcagaaggaaacaatggccccggcggtgtcacccaacgccatccgtgcggcatcaccgaatggcgaagcagaaacgcgcagtgcggcattagggatcatccccataatcgcggtggtagaaagtacatagcaaacggcagcaatcaataccccgccaatggtagcgatagggacgttgcgtttcgggtttttcaccacacctgcggcaacggaggcactttccacaccgatgaacgaccacagcgtaacgttaagggtactttgaatcgcaccgaaggtgcccagaccgctgacgttccatgccgccatataggtttcaccacggaaccagaaccagccaaatacggcaatcccgacgatggggatcagcgccagcacggtagcaacggcctgtacgcgggtgatcattttcggaccgacaatgttcagcaggacgaagatccacagcaccacgacgcaggtgatggttaataccaatgggtctttcagaatcgggaagaagtaacttaaatatcctacgccaatgaccaccatggcgatattgccgatccagcaggccagccagtagaggacgttggtttgataaccgagaaacgggccaaagcagcggcgggcgtaagcgtaagaaccaccaggacttgggtcgaggaacgacattttggcgtataccatcgagagccccagcgcaccgataatcgtcaccaaccatccataaatggcaatcccgccagtggaggccaggtttgcaggtaacagaaaaacacctgaccccataatattccccgacaccatcagggtgacggggattaagcccactttgtgagcatcagcatccgaagacataattaaactcctgcgaaggcgagcttcgtgacaataaattacgtcgtatcatacgcctgcattcgatagttgaattattatcggccgggttatcgctgatgccgttattaatatagctcttcgttaaggttaaaaatcaggcgacagtgcgttctctgtgctgactaacataatgcagcggcgtcataccgtagaagtctttaaagacagaaataaagtacgacgtactgttgtagccgcaggactgtgatacctgagagatatttttaccgtccatcattaattcatttacggcatagcgcatgcggcaggtggtgattatttggctataactggtgttttcgcttttcagctttttctttaacagacttgggctaagacataaacaactggctaccatactaagattccagtctttgtggatatcgctttcaataatttgataaacgctgtcacttacacaattacgtaacatatacatcattagtgaaaggaattttttactgtcgagaaaacgggatagcacagtgaataataatgcacgtgttcgttccttttctgactcagtttcagcgggcatcatgctatgctgcgcggcaacgcgaaagacgtctggcgtcaggcatggcagggtgaggatgggcgtagcgctacgttgccatactggtatttgcgagagatctttattcagaaaccggaggtaatctttgatgatgtcgtgactaatatgagcaaccaaagtgttattaagagaggagacgtcgataatattattttcacaatttaataacgccatgtggttagctttaaggctaataggttctttcccattcacccttatccagacatctttttcagtcaataaaacaatacaaggttggtcgctgcaaatcctcatacatgtactcctgagtgcgaataaaagaccagttctcgctaaagcgaagcgataccgggaaatggttatataattgtatgatgaatataaacatgcataaaaataacgagttttactaatattacaaatttttatagtaatttctcatgtacatatttttttacaggctaaaaaaaggataaataacaggcaaaaaaaagcgcggggtgggaccgcgcaaaaagcatgacattttttgtttgcagcaatttttatgaaaacgttgccatacttaaaaggcctcaagccaggcggcgtaatgttatttaacaattacgccttcagcggaatagtggttacgctttcacacacataacgtggtaaataccgtcaataatttctgtcccttctgtttcgtgttcaaatccagggaaatgatggtcccaggattgcagtgagcgtaaataacttacttgcggactgtttttatcgccgaagttttcaccagacagcagcatcgggattcctggcggatacgggataactgagtttgccgcgatacgtcctggcagattttcaatggataccagttcgacattgttgtcgacaatcgcgttgtacgcttcacgcggggtgatttccgccaccggtaggccagaataggcttcattcaaccgtgcgccagggttgttttctttcagccaggcaaacatggtgtcacccagatcgtgaatccccatgttcgcgtaagtgtcaggatattgttcaacaagttccggcatcacctgcgccagcggtgtgttggcatcatagtggcgtttgaaggagcaaagggtgttaaccagagtcccccatttcccacgggtcacgcccatagagaacaggaacataatctggaagtcagtggtacgggtaggcacaatgccgtggcgaccaagccaggctgtgaccagcgccgccggaacaccgatttcttccagttcaccatcttcacccattcccggagcaaggatgctgactttaatcgggtcgagcatactccagttatccggaatatctttgaagccgtgccagctttcgcccggatgcatgacccagcagtcctgaacggtggtcagcagtttggttggtgcgtcagcaaagtcataggttttgccggtttgtgggtcggtgacgacttctttgttccacggtttgaagaaccagctaccgtcagcggtgaactctttatacagccgcgccatcgcctgacggaaatcaaccgcttcgtcgatcacttcctgggtcagtgacaggccgctgttgccgtccatcatcgacactgccacgtcgttggatgcgcagatggcatacagcggggaggtggtggcatgcatcatgtaggcctggttgaagcgggagaagttaatcgccccacgaccttcacgtacatgaatataagaggcctgggacagcgcattcagcagtttgtgggtggagtgggtggcgaaaacggtaggaccgttgtgatcgccaggttcgccgcgcatggcatagtgatcggcatagatcgggttgaaacgtgcatagccgtaccaggcttcgtcaaagtgcagacgatcggaggttttttccagcagatcctgcgcttctttagcgttataacacacgccgtcataggtacagttggtcaccacgcagtaagacggtttttgcccgactttgtctttggtcagcgggctttcactgattttcttctgcaaggtttcaggttgcatttcctgcggatagattggcccgataatgccgtagcggttgcggcttggcaccatgtagaccggtttcgcgcctgtcagcatcaagccttgttcgatggatttatggcagttacggtcaacgaccacgacatcgttatcggtcatgcaagcctgcatgatggtgcggttagagccggaagtaccgacgactaccgaccaggagcgatcggcaccaaatacgcgtgcggcatatttttcgctttcgccaaatgcgccagtatggtcaagcaaagaaccgagggaagtgcgttcgatgcccatgtcggtgcggaacagattttcaccatagtagtcatggtagaaacgtccggcgggtgttttagtaaaaccaacgccgccctggtggcctggcgctgcccaggaatattcatggatgtcgctatatttcatcagcgcgctgaacagtggcggcaacagctgctggcggtagcgggtcatcgcggcaacggcgcgtccggcgataaagtcggcagtatcttccagaatccaggcgaattcatcgacaagctccagcagatcccggtccattgcggcgagggctttttcccgatcgcccaacaggaagaccggcacgttttgttggcgctcatgaagcttaccgatcaattgtctgacgttttgatgttcgtccggatgttccatttgatagctgaacatcaggcagtcaatggcttcgtttgaagagagaatggcaaaaccatcatcaaaggaggtggatttaatcacggtaacattttgctggcttaaagcatctgccagacgctcaacggcgttaccgacccaggtgtcttgatggagaaactcgctttcaacaattaatactttcatcattgcttacccggttatgaaggaatcttcgttgcgggcaagtatcttccggccttttcgggctgtaaagcgcgtgaaaaacaaacatttttgaaatatttatttttataaacaatacgttatgtgattattttaaattattctcactgcttattatcgacggctaaactatttttttggctgatactgatatcgtctttagccgggaaacgtctggcggcgctgttggctaagtttgcggtattgttgcggcgacatgccgacatatttgccgaacgtgctgtaaaaacggctactcgaacgaaagcctgccgtcagggcaatatcgagaatacttttatcggtatcgctcagtaacgcgcgaacgtggttgatgcgcatcgcggttatgtactgtttcatcgtcaattgcatgacccgctggaatatccccattgcatagttggcgttaagtttgacgtgctcagccacatcgttgatggtcagcgcctgatcatagttttcggcaataaagcccagcatctggctgacataaaattgcgcatggcgcgagacgctgtttttgtgtgtgcgcgaggttttattgaccagaatcggttcccagccagagaggctaaatcgcttgagcatcaggccaatttcatcaatggcgagctggcgaatttgctcgttcggactgtttaattcctgctgccagcggcgcacttcaaacgggctaagttgctgtgtcgccagtgatttgatcaccatgccgtgagtgacgtggttaatcaggtctttatccagcggccaggagagaaacagatgcatcggcagattaaaaatcgccatgctctgacaggttccggtatctgttagttggtgcggtgtacaggcccagaacagcgtgatatgaccctgattgatattcactttttcattgttgatcaggtattccacatcgccatcgaaaggcacattcacttcgacctgaccatgccagtggctggtgggcatgatatgcggtgcgcgaaactcaatttccatccgctggtattctgaatacagcgacagtgggctacgggtctgcttttcgtcgctgctgcacataaacgtatctgtattcatggatgactctctttcctggaatatcagaattatggcaggagtgagggaggatgactgcgaacaggcgcacggttttatttctctccctggaggtgcgaggagagcggatgagaagactggggtcgattattcagcttttcaggtaatttattcccataaactcagatctattgatgtgccacttaggatctgagtttttgggaatgctcaaccgggaaaccggaggttttctgcgatatcgcctgccatgatgaagtcattcaagcaagccaggagatctgcatgatgtctgcacctaaaattacatttatcggcgctggttcgacgattttcgttaaaaatattcttggtgatgtgttccatcgtgaggcgctgaaaacggcgcatattgccctgatggatatcgatcccacccgcctggaagagtcgcacattgtggtgcgtaagctgatggattcagcaggggccagcggcaaaatcacctgccacacccaacagaaagaagccttacaggatgctgattttgtggtggtggcatttcagattggcggttatgaaccttgcacggtgactgatttcgaggtctgtaagcggcatggtctggaacaaaccattgccgatacgctggggccgggcggtattatgcgcgcgctacgtaccattccgcacctgtggcaaatttgcgaggacatgacggaagtctgccccgatgccaccatgctcaactacgttaatccaatggcgatgaatacctgggcgatgtatgcccgctatccgcatatcaagcaggtagggctgtgccattcggtgcagggaacggcggaagagctggcgcgtgacctcaatatcgacccggctacgctgcgttaccgttgcgcaggtatcaaccatatggcgttttacctggaactggagcgcaaaaccgccgacggcagttacgtgaatctctacccggaactgctggcggcttatgaagcagggcaggcaccgaagccgaatattcatggcaatactcgctgccagaatattgtgcgctacgaaatgttcaaaaagctgggctacttcgtcacggaatcgtcagaacattttgctgagtacacaccgtggtttattaagccaggtcgtgaggatttgattgagcgttataaagtaccgctggatgagtacccgaaacgctgcgtcgagcagctggcgaactggcataaagagctggaggagtataaaaacgcctcccggattgatattaaaccgtcacgggaatatgccagcacaatcatgaacgctatctggactggcgagccgagtgtgatttacggcaacgtccgtaacgatggattgattgataacctgccacaaggatgttgcgtggaagtagcctgtctggttgatgctaatggcattcagccgaccaaagtcggtacgttaccttcgcatctggccgccctgatgcaaaccaacatcaacgtacagacgctgctgaccgaagctattcttacggaaaatcgcgaccgtgtttaccacgccgcgatgatggacccgcatactgccgccgtgctgggcattgacgaaatatatgctcttgttgacgacttgattgctgcccacggcgactggctgcctggctggttgcaccgttaaggggtaatcgcttccggcgctctggtgattaagccaaagcgccgtagctggcggcaatgaaagcgagcgaggaatatcaccgtcgttaatgcgcccagtagtgcgcagaacatatcggattgcgtatcccacgggtcgccttgagtaccgagaaaatcatctgcgccctggcccattgccagcgctgcccaccactcgattaactcatacatcgcgcttatcgccagcgcgacacaacagaccagaaacgccaccattttacgcccgcgaacgtacatcccgcgcacgaggtgccaccagtgcaggcaccagcccctggaaaaaatgccccagtttgtcatacggattacggctcaaccccagccattcctgcacctcaaaaccaacggggactttcgcgtaggtgtattgcccgccgaccatcaggatgatggcgtgaaagaaaatgagcgtatagagcagcggcgttaacggataacgtttagcggtggcaagcagtagcggcacgacaataatcaccggtgtcacttccatcagccaggtgagtttgtcatgggccgaaatgccggtataaatcaggattaacgttagcgccagtgcgccggtgttaagaattaacggcttgagtgtgcgggtcatggtgagttcgcaagtcagggaaaatactgactattgaccagtaagcgtgaaattacaatcgcaaaagaggtggcccagggggatcacctggcagcatgctgccaggcgctgggccgaagaggttacttagtgcagttcgcgcactgtttgttgacgatctgctggaagaagtcgttacctttgtcatcgaccaggataaacgccgggaaatcttctacttcgattttccagatagcttccatacccagctccggataagcgacgcattccagatgcttgatgctctgctgcgccagtaccgccgccggaccgccgatgctaccgaggtagaagccgccgtgtttatggcacgcgtcggtaacctgctgactgcgattacctttcgccagcatgatcatgctgccgccgtgggattgcagcagatccacgtaggagtccatacgacctgcggtggttgggccaagtgaacctgatggataaccggcaggcgttttcgccggacccgcgtagtagatcgggtgatctttgatgtactgcggcagttctttaccggcgtcaatcagctctttcagcttggcgtgtgcaatatcgcgacccacgataatggtgccggtgagcgacaagcgggtggataccgggtattgcgaaagctgggcaaggatctctttcatcgggcggttaaggtcgactttcactgcttcgccttcacctgcctgacgcagttcttctggaatgtactggcctggattgtgttccagtttttcgatccagataccttcgcggttaattttcgctttgatattacggtctgcggagcaggagactcccatgcctaccgggcaggatgcgccgtgacgtggcagacggataacgcggatgtcgtgcgcgaagtatttaccgccaaactgcgcgccaagaccgagtttctgggcctcttccagcagttcctgttccagctggatatcgcggaacgcctgaccatgttcgttcccttccgtcggcagttcatcgtaatagtgagcgcttgctaacttgacggttttcaggttggtttccgcagacgtaccgccaatcacaaacgcgatatggtacggcgggcaggctgcagtaccgagggtacgcattttctcgacgaggaagtttttcagtttgccgggcgtcagcagggctttggtttcctggtagagatacgttttgttggcagagccgccgcctttagcgacacagaggaatttgtactcatcgccatctaccgcgtacaggtcgatttgcgcaggcaggttcgtgccggtgttgacctctttatacatgtccagcggcgcgttctgtgaatagcgcaggttatcttcgatataggtgttatagacacctttcgatagcgcttcttcatcaccgccaccggtccacacgcgctgaccttttttaccgacgatgatcgcggtgccggtatcctggcaggtcggcagcacgcctttggcggcgatttcggagtttcttaagaattgcagcgccacgtacttgtcgttttcgctggcttctggatcgtgaagaatagccgcaacctgtttctggtgtgccgggcggagcatgaaagaagcatcgtgaaaggcttgctgcgccagcagggtcagggcttctggttccactttcaggatggtttcgccgtcgaagtcggcaacgctaacgtaatcggaagtgagtagatagtattcggtattgtctttccccatcgggaaaggtgcctggtagataaagggtttgtttgacatagcttccagcctgtaactctgtatttgttattcgaaaatggcgtgccgtgtagtcacgggcggcacgcaaagtgcatttataagaacccgtacatcgcggcgaagatccagccgaagacgcacgatacgctcacaccaatcaaccccggcagaataaagctgtggttgatgacgaagcgaccgatgtgggtggtgccggaacggtcaaactgaatcgctgccagatcgctcggataagtcggcaggatgtaataaccgtagcaagccggtgctgaagccacgatgtatgccggatcaacgccgatcgccagcgcgaccggaacaatcgccgccagcgccgcagcctgagagtttacaaacttggaaaccagcagcagaacaatggcataggcccacggatactctttcaccatttcacccagtacgccctgaatttcagacatatgcgcaccgaacatggtttcagccatccatgcgataccgtacaccgccacgatggcgatcataccggaacggaagacttcgttttttgagatagacgcgggattggttttggtcaggataataatcagcgccccggtcagcagcataaacatctgaataaccagtaccatcgacagcggtttgccgccgaaggatggacgcaggtccgaatcagcaccaagaagggcgactacagcgattgccccgaggaagatccacattgccagccagttgcttttcggcagttttttatccagcagcgtcgcggtatcaccgtaaacatactcacggttttccggtacggagatgaatttttggaactcttcgtctttatccagatctttaccgcggaaccagctgaagataccgatcgccaggataccgattaacgtcgatggaatggtgattgccagcaggtcgaggaactcaagatggcgaccatcaaaggtgacattacccagcatcgcaaccagagatacgaccgcaaccgacaccggactggcgataatccccatctgtgcaccgatagaacttgccgccatcggacgttccggacggatgttgttcttaatagcaacgtcgtagatgatcggcagaatggtgtaaaccacatgacccgtaccgcaaagaatggtcagcgtacaggtcacaaacggcgcgacaattgagacatatttcgggttgcgacgcagcagcttctcggcaatttgcagcatgacatcaagaccgcccgaagcttgcaaggtcgccgatgccgccaccaccgcaatgataaccagcatgacatcaaccggtggtttacctggctgaaggtggaagacgaagaccagaatgaccagaccgataccgcctaataaacccagcgcgatacccccctttctggcaccataaaacagacatatcagtattatgataagttggatagtaaataacatgtgtgaaccctcgcgataatcctatttaaatttttgctgaatagatcacagtcacgttctgttttgtatgaactgttttcagagcctgactaaatatccgtttggtcgttaccggcttgagcaaatacctcacagtgaatattggctgattaaagcagcggcaaatttatgcactgtgataagcggctttttcagagagaaagactctctggcgatgggtttatagtttgtacagcgcagatgttaatgttttgtttgctgttatcttattgatatttatcggtctgttttttgttctcagggcaggtatcattaggtttatagattaatctgatctacccatttgtgggtaaaaatacacataatgtgggtgacataatagttaattaacttttgttagcgttttgaaattaaaaacaccgttcatctgaagagatattaatttttagcgatgatggagggataattatatttgatctggcacaagttttactgatgaacaatgtaacttgtgccaggggtattttgcattacggtaataattattacttacagataaccagcgatccgttattggcaatattgtttcagtagtgagtagtgttctgcctgaatacggtaacggtaaaccggacgccccgtgacgccataatggatactggtgaacaatatgtggcagttgaccagccagataaggtatttacggcaggaaacacgcgagatgttaacctcgttagccagctcgtcggttgaaaactcatagtcctgatgcgcgtcaatccactggcacagcgtgcgtaacgtctgcggcgttaagccttttggcaagcgacgaggatcctgctcgttggagctgctgccgtggattagctgatcaagctcggcctggtcataatactgatgtttttccagcgccattttcttttgccgccagccggtgagcgcctcttcaaagcgggaagcctggaagggtttgatcaggtaatccacaacaccgtaatgcagcgaatctttaatggttactgcatcggcagcggaggagatgacaatcacatcacttttgcaacgcgcgttatgcaggacaggcagtaaatcgagcccgttctctttttgcatatagatatctagcaatatcaggtcgataggcgtatcgctattgaagataatctctttggctttctccagcgtcgaagccgttccacagcattgaaagcccgggatttgtgccacgtatcggcgattcagctccgcgaccattgcgtcatcatcgataattaatacattgatcatctgttcgacctctccccgtcccagggtatctggacaaaaaattgtgtgaaaatcccgggttccgattccacggcgatgctgccgccgagattttctacctgttgtttgacaagtgctaaaccgacgcctcgctcgcttccttttgtcgagacacctttgtcaaaaatgtgatcgattttgtcgggtgcgatccccggtccatcatcgttaacttcgcagtgcagccagccgtgacggtagtgcaatgttacgctaatttcgccaccgggttccggccctaatgcctccagcgcgttttctatcagatttcccaacgtggtaatcagcgtcgcgacctgatcctcactaccgctgtctggcagctggctttcactgtttaaaatcagcgtatggcctaaatcggtcgcgcggttaatcttgctgattaaaaaaccagcgataaccggagatttgatcttacccagcagagagccaatctcttcctgatagttattggctgttttgagaatgtaatcttccaactgcttataactcttcagatgcaataatccgagaatcacatgcaatttattcataaattcgtgggatcgttcacgaagtgcgtcagcatagttgaccagaccgtcgagtcgctgcatcagtttacgtacttcagttttgtccctgaaggttgaaatggcaccgatgataacgccattactgcgcaccggaacggtgttgatcagtaatagtcggtccttaatcgtaatctcttcgtcgcggcgtggggttccgtcgcgtaacacttccgagacatctaccacctgtgaccacgagtggcttagcgtcgacagtttctcatcgtcctgcgacttacggtaattcagcaattcttgtgcggcatcgttgatcagcgtgacctcgccgcgatcgtccacggcaacgacgccttctttgatggactgcaacatggcctggcgttgctcaaacagtgtggagatttcgtagggttccaggccgaaaaggatttttttcagtacgttaaccagaatgcatgtgccgatcagtccgaccagcatgccaaatagtaccgaccagataatgctccagcgactgtcattgatctgttgggtcacgcggcttaactcaaggccgatcgccaccacgccaatttgtttatgattttcatcgtagatgggggtaaatacgcgtaaagcctgcgccagaaaaccgcgattgatagcgacattttcttcgccattcagcgctttaaggatgtcatcacctttaaatggctgaccaatacgctgggcttcaggatgcgagtagcgaagactgtgcatatcggtaacgacaataaacagcagatcgttgcgtttgcgcacggcttccgcgatggcctggattccactctcctgcggttttttctgcaagccctgacggatttccggcgagtcggcgagggtacgcgctactgccagagccttgttagctagcccgtctcgcgtcatatcactgatttgcgagaagtaaatcagatgcaccaccaatagcaccgagaacagtaccgcgctgaccattaagatcacagtggtactcaatttcatcggacgtttgcgtaacatacggtagggcaatgaatgtctcatcagcttccttgtgtgacaaatttcttaagcattatctctgatgaggcgggtaattcaaagggagtaagaatgattggctatattggggaagagactctggcaacggaaactgccagtgctgtatgaagattccggggctatgcttatagtgaaaaccatactgatgagagagggaaggtcatggatcaggcgctactggacgggggttatcgctgttataccggcgaaaatatcgatgtctattttaacactgcgatatgtcagcattctggcaattgcgtacgtggcaacggcaagttatttaatctcaaacgtaagccgtggatcatgccggatgaagttgacgtcaccactgtggttaaagtgattgatacgtgcccgagcggtgcgctgaaataccgtcataaataagcgagggtaaaatggaaatacgcgaaggccacaataaattttacattaatgacgaacagggcaagcaaatcgctgaaattgtctttgtgccgaccggagagaatttagcgattatcgaacataccgatgtcgatgaaagcctgaaaggacaagggattggtaaacagctggttgcgaaagtcgtggaaaaaatgcgtcgggaaaaacgaaaaattatcccactatgcccatttgcgaaacacgaatttgataaaacacgggagtatgatgatattcgcagttgatgggagagtacagagtcacgatatttttcatgctctccgcggtgtgatgcaggagagcatctgaagggtagggggatgcacaaagaatggtcagagagagcgtttttttgtcccaagtcatcccctttactgagcaaaaaaaaaagaatatctcctatatgagaatcatcattcggggttaataagttttgcgtccccagagcgttcaatattgataggagtcatattatggaaggtaaaaacaagttcaatacttatgttgtttcttttgattatccatcatcttattcctcagtgttcttaaggttaagatcattgatgtatgatatgaatttctcctctatcgtggctgatgaatatgggataccacgacaactgaatgaaaactccttcgcaataacgacatcgttagccgcaagtgaaatcgaagatttaatcaggctcaaatgcttagacttaccggatattgattttgacctcagcattatgacagttgatgactatttccgtcagttttacaagtagccaggaaggataagaagaacataaaaaatggcactattctctaaaatattaattttttatgtgattggtgtgaacatatcctttgtcattatctggtttatctcacatgagaaaacacatattcgtttacttagtgcatttctggtcggaataacctggccaatgagtcttcctgtggcattacttttttctctcttttaggagctgtagttgagtggacccgctggttatcttgaaacgaagcgtctctcctcaaaactggatttgcggaatgacgaacgaagcagtcgcctgactgcttcgttcattaaagtgaaatttatttctgtgggcgcatcgccgggaagagaataacgtcgcgaatagtatgactgtttgtaaacagcataatcattcggtcgataccaatacccagaccagcggttggcggcagaccatattccagcgcagtcacgtaatcttcgtcatagaacatggcttcgtcgtcacctgcagctttagcgttaacctgttcctggaaacgttcagcctgatcttctgcgtcgtttaattcgctaaaaccattaccaatttcacgaccaccgatgaagaattcaaaacggtcggtgatttccgggttaacatcattacggcgcgccagcggggacacttctgccggatattccgtaataaaggttggctgaatcagatgtgcttctgccacttcatcaaagatctccgtaacaatacgtcccagcccccagcttttctctaccgtaataccgatagattcagctaatgctttagcagcatcaaaattatccagatccgccatatcggtttctggacgatattttttgattgcttcgcgcatggtgagtttttcaaacggtttgccgaaatcaaacacatgctcgccataagtgactttagtggtacccagtacctcttgtgccagggtgcggaacagtgactccgtcagttcaatcaaatcgtggtaatccgcatatgccatgtagagttccatcattgtgaactcaggattatggcgaacagaaataccttcattacggaagttacggttgatttcgaatacccgttcaaaaccgcctacaaccagacgtttcagatacagctccggcgcgatacgcaggtacatatctaaatccagagcgttatgatgggtaataaacgggcgagcagatgccccacctggaattacctgcatcatcggggtttctacttccataaagccgcgcgcgaccatgaactgacggatagcggccagaatttttgaacggacaacaaacgtttgacgggatttatcgttagcgatgaggtccagataacgttgacgataacggacttcctgatcctgcagaccatggaatttatctggtaaaggacgtagtgctttagtcagcaggcgcagctcagtacagtgaatggaaagctcacccgtttgcgtcttaaacagcgtaccgcgggcaccgataatgtcacccagatcccattttttaaactgatcgttataaacaccttctggcaggctatctcttgcaacgtacagttgaatacggccaccgacatcctgcaacgttacaaaggaggctttccccataatacgacgggtcatcattcggccagcaaccgagacttcaatgtttaaggattccagttcctggttatccttcgcatcaaactcttcgtgcaactggtcagaggtatggtcgcggcgaaaatcattgggaaacgccacaccttgctgacgtagtgccgccagtttttcgcggcgatttctcagttcatcgttaaaatcaatagcctcattggctccccgtgtttctcgttcagacattttggttcctctaaatccagctttcaatttagcgtagataaagagacagatcggtacactgtattatctgcctcgactattaataactcagtttatcttatcgaaactaacgcttacctcaagttgatatcactaataaataaccatcaaaatggtttaaatgacttattaatctcgatttactagtgtgataaactgaaagttaatttattcataaccaattgtttttacgacagttaatcgttgctctcctgtatcatattcgtcggcgtgctaaacagaaaacgggtagcaaaggccaataccacgatgatcgcgacacaagccaacgtccactctcccatctgagaaaagaatcgctggtaagcggcaattgccataccgctaatttgcgactctgtcgtctgctgtgccacgacgcctgccagccagttggcgaccgcgcctgttgccagcatataaataccggttaatacgccagacattttcagacgcgtgatttgcgcaatcgccaccgggtcaataaagagttcagcaaagcccattagcgccagcccggatatcatcacgcccattgacgcttgaccgccagccgctgcatgtcgggcatcaaatgccagcaacataaagccacaagccatcagcagtaagccaaaggcaaacttcagccagacgcgcaatgctgaattgccgcggctttctggcgacgccagccaggccagaacaaccccagcgagcatcaccgcaatagcattcaccgactggaatagtgctgtaggtacttcaatattgaatgcctgacgattcacaaagcgatcgataaacaagctgatggtactgccgccctgttgtgccagtacccagaacaacgtcccgacaaacatcaacaatacaatttgccaaagagcacggcggtgttcggggaatttgatcatcatgcgggcaatgatttgtgcggcaatgaggcaaacgatcgccagcaaatatccggaccagtcgttctccagcagcagggtaaaaaatactggggctaaacagagcatcaccactaaccagctccatactggtaaggcaaatttcacgctagtgagcgctttcttatccatactacgcgtggactggaaatgacgatgaccgcttaagaaaatcaacaaaccgataaacatgccgccacccgcaagggcaaagccaacatgccatccataccactgagcagccaggccgcaggcgatgggggctgcgatagaaccgatattgcccgcagcatacagcagcgaaaaaccgccatcacgtcgatgatcgttctcgtcgtagagctcgccaagcaaacagctgatgtttgatttgaataaaccgtagccacaaataatgattgccagcgccagatacaggctaaaggttgaatttgtatcaatgcccagcaccacatggccaagggtcattaacagcgcgccggcaatcactgcagtgcggttgccgagcaggcggtcggcaagccagccgccgagaataggggtaacgtaaaccagagaagcatatgcgctgaacaggctgatggcatggttatcatcaaaaccaagctgatgggtgagatagagaatgagtaaggcacgcatgccgtaaaaactgaagtactcccagatttggatcgccacgatatagtatatcgcgcgcggctgtgagggtgttttcatgtgttctccttatgagcaaaaaagggaagtggcaagccacttcccttgtacgagctaattattttttgctttcttctttcaatactttaacggtatagcggccatcagcctgacggtatgcaccgtgaatatcggtttcaaagcccggatagtgagcgccgatttcacacagcatctgcaggaactccagaaccggacggctttcttcggtgatcatttcacccggcattaccagaggaactcccggcggatacggaaggatcatattggcgttaatacgaccgaccatttcgtcgaggtaaacttcttcggtcataccgtgcagctctttctggaacgcagcatacggagtcattaccatagtcggcagaacttcaaatgcgcgatacatcagatccggcagattgtggtgaacaatcagtttgtggatattctgagccagttcctgaatacgcatgttttcatagaattcaggatcttcacgatacagagacggcagcatgtttttcacacgcaggttcaggtcgaacgcacgtttgaagtcagtcagagcacgcagcaggctcagtgctttggtcttatcgataccgatgctgaacaggaacagcaggttatacggaccggttttctcaacaacgatgccatgttcgtcgaggtatttcgccacgatgctggccggaataccaaagtcgctcatggtgccgtctttttccatccccggagtcagcagggtgactttgatcgggtcaagatacatgtgctcgttatcgatgtttttgaagccgtgccatgtgctgtcagaacgcagcggccagcattcagtcgtatcgatatgatccggctgccatacatcaaagaaccagccatcagattccgttctcagacgtttgatctctttacggaatttgatcgcacgttcaatggaaccattgatcagacgtttacctgcattgcctttcatcatcgccgcagcggtttcagtggacgccacgataccgtagtgcggagaggtggtggtgtgcatcatgtaggcttcgttaaaggtttcttcgtttacgtcacctttaacgtggatcatggaagcctgagagaacgccgccagcagtttgtgagtagactgggtttcgtaaatcactttcccttctacacggccaccgctcataccgcatttaccttcgtaaatcggtgagaagttggtgtaaggcacccacgcggagtcaaagtggatggatttcacatccagtgttttcttgatgaagtcggtgttgtacagcagaccatcataggtagagttggtaattacagcatgtaccggccaggttgcgtttggtgtttctttcacgcgcttagcaatggtagcgtgctggaattcactctgtgggataccaccaagaataccgtaagcgttacgggtcgggcggaaatagattggcgtaacatcgctcatcatcatcaggtgggtcagcgatttgtggcagttacggtcaatcagaatggtgctgcctgccggagcagagtacataccaacaattttgttcgcagtggaagtaccgttggtcaccatgtagctgcggtctgcgttaaagacgcgagcgatatactgttctgcttctttgtgtggaccactgtgatccagcagagaacccaattcagatactgaaatggaaatatcagatttcatggtgttcggaccaaagaaatcatagaacaggctacctaccgggcttttctggaatgcagtaccacccatgtgaccaggagtacagaaagtatatttaccttcacgaacatatttaaacagtgctttggtcagcggaggcagaatagtgttgatatattcgtcagtggtctgcttgatcttgttagcaatatcatcagcagcacccagcgcatattcaaagaagctaatctgtaaacgcaggtcattcaggcttacatcgagagtggaatacgtattagcgaacgcgtacaacggcaggttctcgttcattttgctaatttcttcgcacagctcgagattatatttatcccagtcaaaaataacgccgcacagacgcgcattgttttcgatcagttttaataagtcgtcacggtcgttcgggtaaacaatctggaagttcagacgttcaagcgcgcgatgaagttcacggatgggttcttctttaaaataaacccccatgtgattcaatattgcaataacgttcatagtcatatctccaggtaaaaaaggcccctcccaacacatgggacaaaatgaaaggaggagcctcggaaaatacttttaattaatgtgcgttagacgctgtgtggttatccattgagtggctctggcgctcgtgcattttgcgagcgtagaacatcaggataatcaggctgacgatgaaggtacctgccagctcgaaggagcttgcgcccatcagcgcgatgaagcagaacacgcaacccagtacagagcagatcaggctgacaaagttgcggatgttaacgccttcaaaacgaatcaggtcaacgcaagagtagaagtacggcagcatagtcagcagtactgcgataccggtcagttcaccgaacaggtcagatgctttaccaccggcagagttcatcagagtgatgaggatcatcagggcagtcattttcactgcagccagcagcagaccttttttcggaataccgttgctgtcgacttcaccataaactttcgggaagttaccgtcgttagcggcacgtacacctgcctggcctaccaacatcatccaggagcccagagaagtcagacacgcaaaggcggtgaatgcagaaaccagtggcgcagcccagttaccgaggatagttgaagcactgattgcaaacggagcaccggaagccgccattacagaagacggatacataccggaaagcacctgagtcgcagcgatataaacaatacctgctaaaccagtacccagcatggttgccagcggaacggtacgtttcgggtttttaaccataccagtacttactgctgcggattcaacacccacgaaggcccacaggcagagcagaatacttttaatgatcgcatgaccatcagtggtatccgcagtattccagttagctgcataagttgctgcatcaaaccaatgccagccaacaatagcagtcatcaccacaggaataagaaccagcaccagaccaatagtggttaaacggcttacccaggtaccgccgagcatatttacaaaggtaaatacccagacgatagcaatacaggcgatacccgccggaacaggatcatttaatactgggaagaaggtggaaagataagatacagcggtaataccaattgccaggttaccaatccagttagcatggtaataaagaacacctgtctgaaaaccaaatgcaggggaaatttctccggcatacgcaattgggccaccttgttgcgggttttttgttgccagtcgggcatatacatatgccagcgacattgcaccaataatagagataatccaaccccagatagcaataccaccgatacttgctaggttcgcaggtaataatgcaataccgctccccatcatattaccggcaacaacaccggtacaggcaaatagcccgatcttcttggcagaactcatgctcttctcctaatttcatttttgaatttggagtccgggtcatgatgtataactatttcctgaccagaccaaactggcgctaagattactcacgaaaaaaggattaatcctaaagattaggtgaaataacacaaaagtttctgtaagtgagaacttgaggttttttattaacacatcaggatcgcaagttgatatcatgaaaagataaacattcaatatttacaatgtgttatgtgacatcttctggttaaatttatgtaataaaaattatgcggcaaataaattgccgcaacatattataccaacgggaacatacaaaaactcaccaacaaatattcccgagcatgaatcaacccgggagttacttattctgaagcgagaaatttgtcgagataaggtacaacataaggaacagaagtctggaatataccattttcaatccagtaaagggtgtttgcccctgggcgtaaattaaaggcggtgagatatgcatcagctgcttcccggttcatccccttcatttcataaaccttgccaagcaacacataatttagccaggacatttcaagatcaatgccggtatttatcgcctgataagactcatctgttttaccttttaccagggcactgaccgcttttatttgatatataatggacaggttgttcaattccggcagtgtaacaatgttatctatttctgtgttcagtgctgctaattgtttttcgtctaaaggatgttgagaatggcgcacgatatcaactaatgctttttctgctctcgcgtaggtaaattctggggatgattgaacaatctcacctaataattcactggcacgatccaatgatttatcatcaccatgcagtaaataatcatgtgcctgataaaaattagttaataacgcaccacgatgcggcaaaatttgctggagcatctcctgcattcgttgtggccacggttggtttaacgcttttgataaactctggagcaaatcattttgaatcgccagctgattaccgttagtgatgacataacgtttatccagcatggttgaaccatctgcattgtctaccaattttaccgacataaagcattgttgagcacggtattggcgctgattaacaaacgcaatagataatgttttaccggaactgctcggttcatcaatgttgtagttgattttgtcatgcaccataaaggtggagaaggtgttaagtgatgtcgccaccaaatcacccacgcctatcgcgtaagagagctgatacggagaactccagctgttacaactcttattaaccatattaatgtcaatatcgcgtggattgagcaaaatgcgcgatttactcataggaagacgtgtttcaagacttgaaaacgctaccagtgcgacacagatacctaacgacaacaggaaaaaaaaccatacccaaaaggtagtgaatcgtttgcttttaactggggattgttcaggtggcgttgtggtgttttgaatgttaagactgtgggagggagaatctgtggcaggaaccgcctctggtatagggggaggcgaagatagcattatttcctctccctcttcttcgctgtaccagataaccggcaccattaatttatagccgcgctttggtacagtagcgatatagacaggactatcttcatcattatcttttaatgacttacgtagttctgagatactctgcgtcacaacgtgattggtgacaatacttctcttccagacattatcgataagttcatccctgctaagtacttcgccactgtgttgagcaaagaaaaccagaagatcgattaatctcggctcaagggtaagttgacgcccattgcggctaatttggtttatggacggagtaacaagccattcgccaacgcgaactacaggttgttgcataatagaaactcattcgaaaagggaatgatgcaatgataattgccataacctattttttccatctatagatgggtttatttacatattattggtgaatgcaagacgttatttttacccgccataaacttcttgattacatagtattacgaaaggattttactgagaaccagaagtaatattccttatcatcaaaattcatcatctttgccaaagaaaaatgttcagaaaataatccatgaaaaattgtccggagcgcttactattttaatggattgttagtctttgcatgagcaagtggaccgatacatttctctttgttctcattcagaaaatctcatcagttggcgttcagaccgatgttgtgctttatggatgcgttacgctcctgatgacgtcatttgacgttcaacagcatcacggggccgcacgacatttcacgtcagtcagcgctatagctcagaaacaaattttcccgaattgggatatgcccgcaaattgctggtgatgtggggagaatctggttgagttcggtagaattgatttggcggcaggacgcttaaatcgtggcgtcctgaaacgaaaaacggacctccgtggaggtccgtttatatgaatttggtgccggactcggaatcgaagccaaatttacaggggcaattggttttgtaattccagctcagtcccctgaagaggttgatcacacctcgctcaaacacgtcatccttattctggtgcagttgttcaaacgtactcaggatattcgcctcgctgatttccggaaagttatcgtactccagtgagcggtaccatgtatcatgggcctgcgcatccattaatgacagcatcccggaatgttgcatcaggtcacgccagatttcgcgatcgagattgcgggtgatggctttcattgcggtttccggtttctccatgagccagcagccgcagcgaaaatcctgtttcatcgcccagtccagggcggttttacctccaatactttctgtcagtactgagatttctgccagttgccggataagtgtgtcgatttgcagcagcgcactctttcgtacagccagaatgtggcggatactggttgagcagataacgtccgtatgcccgttgaccacttccggacgggaggccaaatttacaggggcaattggttttgtaattccagctcagtcccctgaagaggttgatcacacctcgctcaaacacgtcatccttattctggtgcagttgttcaaacgtactcaggatattcgcctcgctgatttccggaaagttatcgtactccagtgagcggtaccatgtatcatgggcctgcgcatccattaatgacagcatcccggaatgttgcatcaggtcacgccagatttcgcgatcgagattgcgggtgatggctttcattgcggtttccggtttctccatgagccagcagccgcagcgaaaatcctgtttcatcgcccagtccagggcggttttacctccaatactttctgtcagtactgagatttctgccagttgccggataagtgtgtcgatttgcagcagtgtactctttcgtacagccagaatgtggcggatactggttgagcagataacgtccgtatgcccgttgaccacttccggacgggagactgtgattgcagacataatcgatattccttttcgcagataaatgaaaacgccagccctgttcaggctggcgtcagtggaatgaagtatggtgagtgagatttaccggttctggtgcagaagctgcagatgagagtacggacatcctccctggcctgtgcgatacagggcaacagtgctgccgaatctgttttatcctcatcgttgtcgaagataattcccgattcgcagtcgatattgtcctgcagccacgtaatcagaatatccagcgctgtttccgtggttaatgatttcatgttgtgcagacattcagcactggcatccagatgaatgagactgacaccataacaccggatgagtgtgacgaccagacgacggaacgtttttgacagccccaggcgcttaagccgcagaaccgggtatgaccacgtatcggtacgtaacagataaccggtaccggtaaaatgaatccattctgattcaccgaagtcactggtctggtgtgacagcgagtacagccaggcgttgtccgtttccgtgatatgtgcggtactgcagcgtatgccggtaagggccatggttaatcagttcagcgagattaacaccatcaatgtcaacgacaatgcgccccatgttcagcgcctgcacgttaacgctgtcggcttccagcgtcagggccagtttcatcgtttcgcctccggatgcttccccagggtaatgttatttaccgttctgtaattgtcgcggatcatcaggcctgttgcccggcgagcccggaggatatcgatgctgtttattaactgagaacgggtacaggcgctgaatcccggcaggtcggtacgtaccagtgcgtatttttccacgagaaagttcactgcatcacacagtgaaatgcctgcctcaatatgctgctcaatcacacgttcatcagcgaacggtgtgtcattcagcgtaaggccgtagtgctggtccagcagtcgggtgagcagtgtctgccagatggtgactggagacgggcagcacgatacctcccgtacatgcgtgtcgggtaatgttttcatactgaagattttcctgatatgcagagataaaaaatgggacagtggcgtggtgaaaacaccaggccggagcagaaggttattctggtggtttactttttcgtttcaggtgtcggataaacagccagataaacgtaaccacaggagccgagggtgtcggcttcacaggtcagccccttcgcatacagtgtcacggtatgctgatggcggggattcagttcaccactggtgagcattaatttcagttgtttcatcagcagcggaaaggcctggtccagagggtacgcatccgcatctctgaaccggcctctgataccggcacggtcggcaaggtaatgcaaccggttaccctcctgcaccagacgggcgccgaaacagggcgtcactgtgcagggtagtccccaccaggggtggtcgtcattgtcatcgggatgcgttgtcccgggcagtgtgtctgacacgataaaatcctcacagaatcagttcagggtgacgctcatcagccggacatacggaccaaaactgtccttacggcgttctgcaaacacggccagcacaccgggaatatcctgcacttcacgaccggtatacgcttcagcactgccgtgccagcggtatttgccggtacagaacggaaaaagacgggatgccggatgctgacggtgaatacgcatggcttcgccacgggtgatgattttcatagtgggatacctctgaagacagaagataaaagtgaaaacaggtgtgatgtggttcgggttaaagcagaccatattcggcaaaggagaaaacctggctgccaccgactatcagatggtccggcacccggatatccaccaggcccagtgcctgtaccagacgttccgtgataaggcggtctgccttgctgggtgtgacttcaccggacgggtgattgtgtgccagcaccacagcagcggcattgtgatacagggcgcgtttaatcacttcccggggatggacttccgtgcggttgatggtgccggtgaagagggtttcaccggcaatcagctgattctggttgttcagatacagcacccggaactcttcacgctccagtcccgccatgttcagaatcagccattctcgtgccgcacgggtggaggtgaaggccacgccgggttcatgaagatggcggtccagggttttcagggcccgttgaatgaggctgcgctcgccgggcgtcatctctccgggcagaaaggaaagctgttgcattgttccagccccattcagtcgatgatgcgcataatggcgctgcattccggatgctgcagggcgtaatcccgcagccggtaataatggaccgtcatggcataacactccgtacgacaggcatgatgactgtacgtcatcagacaggcagcaatgccggcggcttccgggctcatttcagcgcggttaccgttcatggcattgaacagtacccatgtttcgtcatcatcgtcatccggttcgggtgccataaatgccccgccgttgttcagggtgtacagattccagataccaccgcagtagtcttcacacagacggtccatccagccgaagatacggggctccagggtcacccactgtggaatgaggccaaagtgctgcggccagaagctgatggtgtcgatgttgtgaatggcacgggtgtggatacgttttccttttgcactgcggccggaaattccgcctttcagcatattctcctggatggtctgatatgcgctccacaggtctttaccgtaatcctcccggcgtcgtggtgtcagaatgtcagcggtggtgactggctgatgttcgtcaccataacggtaagtcagtgccgcctgtgccagcgcctggcgtgtcggtggcggcaggaccagcgactgcatggcatcacgcttttcctcaatccggtcaaacacgccaccacatttccccgatgcggaacacgcacttcccccggagactgaccacagacgcatccgttctgacagacgaacctgaagtaacccggcagcatctggtagctggaggtaccgtcatgggagttgagcagaatgatttcagggacatgttctccgtttatctccgcagacgcagcatgtgttttgtgtatccccggcggcccgggtcgcgcacacgggtctggcaggcgaagaatggctgaaaatgaaccgccccgggtttcctggagagtgttttatctgtgaactcaggctgccagatcatcgtttccgatggaagcataataagctttttctgcttctgccggaggagtatggccctgcctttccagcaatcgtcgattgttataccagtccacccacgtgaggaaccgccccgggaatcctggagactaaattccctgagaaagaggtaaacaggatgactaaaaatacacgtttttcccccgaagtccgtcaacgggcagttcgtatggttctggaaagtcaggacgaatatgactcacaatgggcggcaatttgttccatagctccaaagattggctgtacgccagagactctgcgtgtctgggttcgccagcatgagcgggataccgggggcggtgatggtgggctcaccaccgctgaacgtcagcgtctgaaagagctggaacgtgaaaatcgtgaactgcgccgcagtaacgatatccttcgccaggcttccgcttattttgcgaaggcggagttcgaccgcctctggaaaaaataatgccactgctggataagctgcgtgagcagtacggggtcggaccggtatgcagtgaacagcatattgccccgtcaacgtattaccattgtcagcagcagcggcatcatcctgataaacgcagtgcccgttgtcagcgcgatgactggctgaagagagagatacagcgcgtatacgatgaaaatcatcaggtgtacggtgtgcgtaaagtctggcgtcagttgttacgggaaggaatcagggtggccagatgtacagtggcgcaggtgaccgcgtaaaccgtcagttcgtggcagaacgtcctgaccagctgtgggtggctgattttacttacgtcagcacatggcagggcttcgtctatgtggcgttcatcattgatgtgtttgccggatacatcgtggggtggtgggtctcatcgtctatggaaacgacattcgtgctggatgcgctccacactcacgtgggtggactggtataacaatcgacgattgctggaaaggctgggccatactcctccggcagaagcagaaaaagcttattatgcttccatcggaaacgatgatctggcagcctgagttcacagataaaacactctccaggaaacccggggcggttcccacactcacgtgggtggactggtataacaatcgacgattgctggaaaggctgggccatactcctccggcagaagcagaaaaagcttattatgcttccatcggaaacgatgatctggcagcctgagttcacagataaaacactctccaggaaacccggggcggttcaaagcagcatttacaccaaaagacaccactgccatagctaccgcaccggcaataaccgacttaatcataaataacaacctctttttcattactgaacacaccagagatatctggcaatttaaaatgacccgattacctttaataaccagatcaatacaaataatattctcgtattttcagggcaggttatttatcgacagaatactgatataacctgtctgctttctgacaagggcttctttttttatcttccagaaactccggaatgccataatttagtcaaatgccgatgactcatctgtataataaggtgcaagccttgctgcaagagcattcagccgtataagtctccccagtgttgtactgaaatacccattattcatctggtatttctcgcagacctccttacgggagtgcccacctaccagatagtccttcatagccagaatgaccctgtcactgtgaatagaagaaatacctatcagtaaaaaaaaatgcatttcagacatagagccgagcaacagcacgctctcgcgtatattcagcaaaaacgcatttcctgaccgactgatgacttcatgatgcgccatgtttcccccttctgtcgggcccctggatatatgcttccggcccggaaatactcttcacgcaataagttaaatttagttttttatgttgtaaatattgatttaaacgatcttttaacccacaaaacaaaattaaaccagaataaaattctaacaacaagaatacactcagataaaaacatcatggtgaattgaatttacagcataaaagatcgtctaaatgcatttttacggactttcttttcacagaaaaataacacacaaaatgtgatacacatcaaataaagccaacaaaaagcaaattcactaaattgcacaaataaagcaaacacagcaaataaagcaaacacagagaataaaaatacctttccgttgataacagagagcatgatttttattattcgaagaaactttgttacagtgagatgagtgaatatatgaagaatgaaatactggaatttctgaacaggcataatggagggaaaaccgcagaaattgcggaggcgctggcggtaacggattatcaggcacgctattacctgttattactggaaaaagaaggtgtggttcagcgctctccattaaggcgaggcatggcaacatactggcttctgaaaggagagaagcaggcggggcagaactgttcttccacaacttaataactcaatctgtgggcatgcttcactgaaacagataaatgtgaaccgccccgggtttcctggagagtgttttatctgtgaactcaggctgccagatcattgtttccgatggaagcataataagctttttctgcttctgccggaggagtatggcccagccttcccagcaatcatcgattgttataccagtccacccacgtgagtgtggccagttccacttctgcacggtttttccagctcttacggtgtattacctccgctttgtaaagaccattgatgctctccgccatcgcgttgtcatacgagtcgcctgtacttcctgttggggcccacaacgcctgctccagcgcatccagcacgaatgtcgtttccatagacgatgagacccaccaccccacgatgtatccggcaaacacatcaatgatgaacgccacatagacgaagccctgccatgtgctgacgtaagtaaaatcagccacccacagctggtcaggacgttctgccacgaactgacggtttacgcggtcacctgcagcaacggttttccggctgacggtagtgcggacctttttaccccggagaacaccggcaagtcccataaccgccatgaggcgcgccactgtacatctggccaccctgattccttcccgtaacaactgacgccagactttacgcacaccgtacacctgatgattttcatcgtatacgcgctgtatctctctcttcagccagtcatcgcgctgcgcacgggcactgcgtttatcaggatgatgccgctaccccgtactgctcacgcagcttatccagcagtggcattattttttccagaggcggtcgaactccgccttcgcaaaataagcggaagcctggcgaaggatatcgttactgcggcgcagttcacgattttcacgttccagctctttcagacgctgacgttcagcggtggtgagcccaccatcaccgcccccggtatcccgctcatgctggcgaacccagacacgcagagtctctggcgtacagccaatctttggagctatggaacaaattgccgcccattgtgagtcatattcgattttcaccagcccatgtctgaagttctgtcagtatggctacagcctgtttgctgagtggcacaagatgtggtgttcgcatcttggagccccggtatgagaattttacgccgggcagaggttcgcgttcggctggaatagtccacatggcattgtcaatatcaatttcagaccaccgggcatatctgagttcactggaacgaataaaaaccagtaaaaacgtgagtctcgaggcttttgagtactttatcgctgtgtgattgtgcccattgtttattactggcatgccagcgtcgcgcaatatgttcaaaagagagctgtaaatcagggactacttttttagctcttttctgttcgcaagggtcaaccccctccgaaatcagttttcgggcctcatcccgttttgtacgccttgtcagtgggctttgcagcccggatttttgcgtcagtcagtgccatagttcagccttctgaatgcgttaaagagggtacaaattctgtcgaactggggtatgcccgcaattatacccacacaatggggttgatgtggggggaatctggttgagttcggtagaattgatttggcggcaggacgcttaaatcgtggcgtcctgaaacgaaaaacggacctccgtggaggtccgtttatatgaatttggtgcccggactcggaatcgaaccaaggacacggggattttcaatcccctgctctaccgactgagctatccgggcaacggggcgcattaaaccgtaatctgcacatctcgtcaacctaatttcagtaaaagcgattcaactgcttaagattgcggcaaatcgcttcttttctgtgtttctgtcaggtcagtgcaccaccctgacggcagcgggcgaagcgcaggatatcttccgccagccgatgtgcggtgtcgacatccgcctggctacgattcaccagcattcggcttaaacagccttccagcaccagttccatctgctttgctaccatcgccggatcgtcaacttccagcgtggttaacagttcgtgggtgaaatcgtaggccgcgcttttttgctgatcggccagttgatgaatagggtggccaggatcggggtaaaacgtacaggcagcgataaacagacagcccggatagcggttgtttttaacgcactccgataacgcctgataacgtgccagcaacttttgttcggcggtttgcgtttcgtccagcatcagctgacgacgccagacatctatctgttggctaagataacgcagcgcatcgtagaggattgcctctttgtctggccagaagcggcgtagctcgtccagtggataatccacacgttcagcaaccatctccagcgtggtgttggcaatcccttgtaattctaataatttcagggcttctcccagtacatcttcacgttgcacgctattttcctccgtctttcccactgcaagtgtcgttcacggttggcgatcgcgcaaatgtgcgctgaaggtttcagcatccataaagcccgtgacgcgtgcttgtggatgctcctggccttgtccgtcaaaaaagagaattgtcggtaggccaaggacattaagatgctttaacagcgccatatcttgtgcgtcgttggcagtgacgttggcctgaagtaagaccgtatctgctaacgctttttgcacctgcgggtcgctgaaggtgtatttctcaaactctttacaggcgacgcaccagtcggcatagagatctaacatcactggtttgcctttggcttcaacgagcgcctgatttaactcatctaccgttttgatttgtgtaaagttgagatgcgtctgagtttgcgcggtatgtgttgcaccaaatgcccaatcctgaagtgggcgtacgctaaccaatgccgctgccagcaggattatttgcaccacgcgcatccagccgcgtttggcctgtaggctggtgataaaggcccagccaaagaatgcgacaccaagcgccgaccacaagcgtaatccccatatatcaccaatcactcgctccagcaggaagaccggcagtgcgaggatcacaaaaccaaacgcggttttgacttgttccatccacgggccgcttttcggcagcaagcggttaccaaagacggtaattagcatcagcggcaggcccatgcccagcgcataaagataaagcgtgccgccgcccagccacatgttcccgctttgggcgatatacagcagaatcgcgctaagcggtgcagtggtgcatggtgaacagatcagtccggcaatcgcccccataataaacacaccgccaggtgagccgccctgttggcgattgctcatcagcgtgagacgtgtttgcagcgaagaggggagttgcagagtaaacaagccaaacattgacatcgccagcaaggtaaagacgatggcgaggccaatgagcacgtatgggtgctgtagcgccgcctggaactgtaaccctgcggcggcaaccaccagacccagcgccgtgtaagtcagcgccatcccctgcacataaataaaggtcagcaacaatgctctggcagtggaaagccgctgtttaccgcccagcacgatgccagaaatcagtgggtacattggcagcacgcatggcgtaaaggcgataccaataccgatcaacaacgcccagagcgcggaaaagggcaattgcgcggtgggctgctcttgctgcggaacagacacaggctgtgacgcttcgttgttagcgaccacttcgcttaacggaacggttttggtttctggcggataacagaaaccggcatcagcacagccctggtaggtgacagttaacgttgctcccgcactcgcctggttgatggttacgggaagcgtcagccgatcgcggtaaatctcgcttttgccgtaaaactcatcttcatgccagacgccttgcggcagctgcacgtcggcaattttcgcgtgttccggcgtaatgcggatctgtttacggtagaggtagtaaccgtctttgatctgccaggtcagattcaggtcatgttggttttgctgaaaatcaaaagcaaaggcttgatccgcggggacaaattgtgaacgtcccggcgcgtcgaataatccggcaaaaacggaagtgctgcaaagtagcaggatcagcgtaaagatgcgttgagccatgagaggtaatctgtgtctccgtgtgtaacaggtaaaaccagaagttccggggtttgatatggatgatgagacttcaggcattccagcagtgcctgctggtgagatacggtagtttttaaaatcatctgcacttcgtattcttgctccagcttaccttcccagtaatagagagaggtagcgccggggatcaaggtcgcgcaggccgccagtttttccgccagcactttggcggctaaatcctgggctgtcgcttcatccggtgccgtacatagcaccacgacagacgtggtattcgaacttttttcatcaagcataaacacctcgcaagaacagatggaaccgcaagagagaggtcactatacaacggacggggaaaggatgttagtcggcgggaaagaaagcggggcgtgaacgccccgcgatgggtcattacagcatgaagctacccagcacgaagccgaagcaaacggccagggcaacacccagagtacccgggatgaagaacggatggttgaagacgaatttaccgatacgggtagtacccgtgtcatccatctgtaccgcagcaaccagcgtcgggtaggtcggcagaatgaacagaccagacaccgcagcaaaagaagcaacagcagtcagcggagaaacgttcagtgccagagccatcggcatcagtgcttttgcggttgcagcctgagagtacagcagagcagaagcaaagaagaagatgacggccagcagccacggatgaccctgaatcacttcaccagcggtatctttgatccagtcgatgttgttggaaacgaaagtatcgcccagccacgcaacacccaggatacaaatacaggcgctcatacctgctttgaaggtgctggagttgagaatgttgtcggtatcgactttacagataacggtggtcagagttgcaacgctgagcatgatgatcaggattgcgttggtggtgttcatcagtggtttttcaaccagacccatgcttgggctgttgatgattgcatagataaccacgccaactacgcccagcaggaacagccagacggacgtttttgcaccggatttgatttcaatctgcttttcaccgcgcagttcaaccaggccctcttccagacgcttgcgataaatcggatcgtcagagagtttggagttgaacagcatagtgaccaggaaggacatcaccagaaccgccagcagggtggacgggatgaccacggaaagcagatggaggtagctgatgccatgaccttccatcacggaagacatgtaaaccactgccgctgagattggcgatgcggtgatcgcaatctgcgcggataccactgcagtagacagcggacggcaaggtttaacgccttgttccttcgcaacttcagcgataactggcagtgtcgccagagagatgttgccagtaccagcaaagatagtcaggaaataggtcacgatcggtgcgaggatcgtgatgtatttcgggttacggcgcagcagcttttctgtctgatgaaccagatagtccagaccgccagcaacctgcatggcagaaatagcggcgataaccgccatgataatggaaatgacatcgaacgggatgttaccgggtttaacgccaatagcggcaagaaccagcacccccaatccgcctgcaaaaccaatacctattccccccaatctggcgcccaagaagatcgccagcaaaactatgatgagttctacaactagcatattagccttccttgttttttaacaagttgatattaaattgttatttttaagttactgctcacaagaaaaaaggcacgccatctgacgtgccttctttatttgtactaccctgtacgattactgttcgctttcatcagtatagcgttttgctttgtaagccgggtgcatcagattctgtacggagaaaatatcgtcaagttccgcttcagtcaacagaccgcgttccagaacgacttcacgtacactcttaccggtttcggcacagattttacccacgatgtcaccgttgtggtgaccgatgaacgggttcaggtaagtaacgataccgatagagttgtaaacgtaaccttcgcacacttctttgttagcagtgatgccgttaatgcatttttccagcaggttgtagcaagcgttggtcagaatgtgaacggattcgaacatggcctggccaatgactggctccataacgttcaactgcagctgacctgcttctgctgccatggtaacagtggtgtcgttaccgatgactttgaagcatacctggttaaccacttccggaacaaccgggtttactttagctggcatgatggaagagcctgcctgcagttccggcaggttgatctcgttcaggccggcacgtggaccagaagagagcaagcgcaggtcgttacagattttggacatcttcacagccaggcgtttcagcgcgccgtgaaccataacataagcgccgcagtcggaggtcgcttcgatcaggtcttcagccggtacgcatgggaagccagtgacttcagccagttttttcactgccagcggagagtactctttcggcgtgttcagaccagtaccgattgctgttgcgccaaggttaacttccagcagcagttcagcggtacgttggatatttttcacttcttctttcagcaggatgctgaaggcgcggaattcctgaccgagggtcatcggtactgcgtcctgcagctgggtacgacccattttcaggatgtcctggaattcgacagctttacgttcaaagccttcacgcagttggttaatcgcatctaccagtttaatcagggaagagtaaactgcgatacggaaaccggtcgggtaggcgtcgttagtggactgacatttgttaacatggtcgttcgggttcaggtactgatattcacctttctggtgacccatcagttccagaccgatattggccagcacttcgttggtgttcatgtttacggaagtacctgcgccgccctggtagacgtctaccgggaactgatccatgcattttccgttgttcaggacttcatcacatgcggcaatgatggcattcgctacacttttaggaatggtttgcagctctttgtttgccatagctgcggcttttttaaccattaccataccgcgaacaaattcaggaatatcactgattttgttgttgctgatatagaagttttcaatcgctctcagagtgtgaacaccatagtaggcatcagctggaacttccctggtacccaacagatcttcttcgatacgaatgttgtttgacatgtgaaccttctttttcaagctgccaatgatttgctttaaacacacagaatatatgtggtttcgaatgtttttcgaccgacgattatcccctgcatcgaccgaatacccgagatcatatgctgcttgaggatttctaccgtaacctggatcactttaagtgtcggtttttaccccttaattattaatttgtgaaatggatcaccgctttgggattactaccaaaaatagttgcgcaaacatcttgaaattttgctaatgaccacaatataagctaaacgcgattcgcaacccattcaggtagccgggtttaaccggctgctattacaggagaaacctttgcgctggttaccttttattgccattttcctttatgtctatattgagatttcaatctttattcaggttgctcatgtattgggggtattgctgaccctcgtgctggttatattcacgtcagttatcggtatgtcactggtacgtaaccagggctttaagaatttcgtgctgatgcagcaaaaaatggcggcgggtgaaaacccagcggcggagatgattaaaagtgtttcgctgatcattgccggtttgctgcttttattaccgggctttttcaccgatttcctcggtttgcttcttttattaccgccggtgcaaaagcatctgacagtgaagttgatgcctcatctgcgtttttcccgtatgccaggtggcggttttagcgccgggaccggtggcggtaatacttttgatggtgagtaccagcgaaaggatgatgaccgcgaccgccttgatcataaagacgatcgccaggattaatgtcgaaacgccggattatgtggttatgccattttccggcgtttttcgttttggcagaaacagccataaccccgccagcatgatcagcgcgtagagacttttccagccgaccattgccagtaacagaacgcataatagcccgccaaccactgccagtagtcgataacgtccttgcaataatttacagcctgccagcatgcataacagataaatcataataaagatgccattggcataaataataagagcgtccagattgatctctaaagcatgaatcaccaacgtgctcaccacgcagcagccgagcaccgcattgagggcattattcggaatatggcgagaagagaggcgtgccaggtaatggtcaggattatgttgcgcctgcgaccagaccaggcgggcgaagctctgtatataaatgttgagactggcaaagcaggccagatagccaattacgcaggcaatccataacgctcctacaccgaataactgcactacaattttgggaagcgatgctgccgccgccatttgttcaccataggcgtcgaagtgtaagacgactaccgtacagccccaatagactaatcctgccagcagcaggccaatcatcaaagcacgaggaaaatcacgctctggatttttaaattccgaggcaagatgggcaaatgcttccagaccgacaaaacaccagaacatcactgataacgcagcgaataacccggtaagttcgatatttcctggcgcagggaaggggatattcgcaggtttgatatcgcccgcccaccagatagcgacaatcagtgcgacgataagcccggcaataactgtttgtagattagcactggaactggcacctcgagtaccgatataccacaccagcgccagcgtaccgagttctgccaacaacagttgcccgctatgccagccaaacattgcctggccgaatccggcagcaatttgtagcgcggcaggcaaacccacgggaatgaccgataaaaacaaccagccggtgactcgctcaagccgcgaaccaaacgccataccgacgaagtgtgcgacgccgcctgcgctgggatagtggcgacccagaatcgcaaacacaatcgcaatcgggaacactaagataatcaaaacgggccacgcccacaggctgttattgcctgctactagcgcagctaacgcaggaacggcaaacacgccagtgcctaataatgacgtcgatagtaggccgatgccctgggccagccccagttcttgtttgagtccactcatgggttgatgtccgattgcgcccaaattttgggcaactgcgtagattttcgatggtagcacaatcagattcgcttatgacggtgatgaagaaatagcgatgaaatgtgaggtgaatcagggttttcacccgattttgtgctgatcagaattttttttctttttcccccttgaaggggcgaagcctcatccccatttctctggtcaccagccgggaaaccacgtaagctccggcgtcacccataacagatacggactttctcaaaggagagttatcaatgaatattcgtccattgcatgatcgcgtgatcgtcaagcgtaaagaagttgaaactaaatctgctggcggcatcgttctgaccggctctgcagcggctaaatccacccgcggcgaagtgctggctgtcggcaatggccgtatccttgaaaatggcgaagtgaagccgctggatgtgaaagttggcgacatcgttattttcaacgatggctacggtgtgaaatctgagaagatcgacaatgaagaagtgttgatcatgtccgaaagcgacattctggcaattgttgaagcgtaatccgcgcacgacactgaacatacgaatttaaggaataaagataatggcagctaaagacgtaaaattcggtaacgacgctcgtgtgaaaatgctgcgcggcgtaaacgtactggcagatgcagtgaaagttaccctcggtccgaaaggccgtaacgtagttctggataaatctttcggtgcaccgaccatcaccaaagatggtgtttccgttgctcgtgaaatcgaactggaagacaagttcgaaaacatgggtgcgcagatggtgaaagaagttgcctctaaagcgaacgacgctgcaggcgacggtaccaccactgcaaccgtactggctcaggctatcatcactgagggtctgaaagctgttgctgcgggcatgaacccgatggacctgaaacgtggtatcgacaaagcagttaccgctgcagttgaagaactgaaagcgctgtccgtaccgtgctctgactctaaagcgattgctcaggttggtaccatctctgctaactccgacgaaaccgtaggtaaactgatcgctgaagcgatggacaaagtcggtaaagaaggcgttatcaccgttgaagacggtaccggtctgcaggacgaactggacgtggttgaaggtatgcagttcgaccgtggctacctgtctccttacttcatcaacaagccggaaactggcgcagtagaactggaaagcccgttcatcctgttggctgacaagaaaatctccaacatccgcgaaatgctgccggttctggaagctgttgccaaagcaggtaaaccgctgctgatcatcgctgaagatgttgaaggcgaagcactggcaactctggttgttaacaccatgcgtggcatcgtgaaagttgctgcggttaaagctccgggcttcggcgatcgtcgtaaagctatgctgcaggatatcgcaaccctgactggcggtaccgtaatctctgaagagatcggtatggagctggaaaaagcaaccctggaagacctgggtcaggctaaacgtgttgtgatcaacaaagacaccaccaccatcatcgatggcgtgggtgaagaagctgcaatccagggccgtgttgctcagatccgtcagcagattgaagaagcaacttctgactacgaccgtgaaaaactgcaggagcgcgtagcgaaactggcaggcggcgttgcagttatcaaagttggtgctgctaccgaagttgaaatgaaagagaaaaaagcacgcgttgaagacgccctgcacgcgacccgtgctgcggtagaagaaggcgtggttgctggtggtggtgttgcgctgatccgcgtagcgtctaaactggctgacctgcgtggtcagaacgaagaccagaacgtgggtatcaaagttgcactgcgtgcaatggaagctccgctgcgtcagatcgtcctgaactgcggcgaagaaccgtctgttgttgctaacaccgttaaaggcggcgacggcaactacggttacaacgcagcaactgaagaatacggcaacatgatcgatatgggtatcctggatccaaccaaagtaacccgttctgctctgcagtacgcggcttctgtggctggcctgatgatcaccaccgagtgcatggttaccgacctgccgaaaaacgatgcagctgacttaggcgctgctggcggtatgggcggcatgggtggcatgggcggcatgatgtaattgccctgcacctcgcagaaataaacaaacccccgggcagaaatgtctgggggtttttcttttggtcatctttctagtataagattcagacacggacgacgcgagtggcgtccagctcattgattatggggaataacatgcacgtaaaatacttagcagggattgtcggtgccgcgctactgatggcgggttgtagctccagcaacgaattgagtgctgccggtcagagtgtacgcattgtggacgagcaaccaggtgcagagtgccagctgattggtactgcgacaggtaagcaaagcaactggctttccgggcaacacggagaagaaggcggttctatgcgcggcgcagcaaacgatctgcgcaaccaggcggctgcaatgggcggtaacgtgatttatggcatcagcagcccgtcgcagggaatgttgtccagttttgtcccgacggatagccagattatcggtcaggtttataagtgcccgaactgatgtgatccagaggctggatacttccagcctcgtagtaaaacagatgtgattatttcgcctgtggtgcagttttgctggtggattgaacacgtaagtgatgcagcgcgcgtaagcattgatcctgggttagcggttgggcgttatttgccgctacggtgcgaacatagacctgacatggcacacccgcgagttttttcagtcgggggctgaaatcaagcattcggcgagtgatcgcctccacttctttacccggcgttgcttcacgcgttttcaccactgcgccgctaaattgttcattgccactttcatctttaaagcggtaaagcaccgccagataatggttgaacaagttatgtttccattccggttgggaataggtgtcatattccagattgccattttcctggcagtcaacgtcgtataacggcaggaaatctaacagtgaggtaatacgtaatgccagttcacgcatttccgcattattaattgcatgaatgattgctcgcgccagcatttcaatctgcaactcattgacgactaactcacatttgctaccgtcatgtagcgttaatacgaaggtaagattttcgccctgatcatcggtaagttccagcgtgttaacccgacgattaatatcggcatttttaagctcatcaaccagaatttctgggatattttctgccattttcttaatgactttatcgcgagcttgttcatactgaaggcgtgcagcagcatccagtttatgcttttgatgcagacgactttccagcgcaatcagaaggtcgcgcaattccatggcagacataaagaacaacgattctttattgcgaggttctttaattttcagcgccagtgcaatgaaattattactcttgcgaataacaccggtattaacacccttgatgcttatggccatgtaggttctccctaaccatttctcaattaaataattaattttagtttataagccagataaatgggcttggtagtaatagttgttaaaataacataaatagccgtgctcactctatataaacagaaaagaaaggttaattattggtgttggttatataaagagtaacaacagcaatgtatatgaataattaaaggttatgcaacgggcaaagattaaacttccctgtttaatcagttactgctggcgtagctggagatccagcggcgttttgctgggttcgccgccaatttctcgcgccagtttaggcaccagatatcccgacaccaatgtcagcaactcacgcataatctgccgtgcttcgtcatcactcaccataaaatgcgccgcgccctgtactttatcgagcacatgcaggtaatacggcatcacgcccgcatcgaacaacgcattactcaggtttgccagcgtttgcgcgttatcgttcacaccacgtaacagaacgctctggttcagcaaagtaacgcccacccggcgcaacttagccatcgcctgacggaatgtttcatctacctcattggcatggttgatgtgattcaccagcaagatttgcagcgtagaatgtgaaaagcgttcaaccagcgcatctgtgatgcgtgccgggatcacaatcggcagacgactgtgaatccgcagacgtttgatatgcgggatggcttccagttgtgtgagcaaccagtccagctcgtgatctttcgccatcagcggatcgccgccggagaaaatcatctcgtccagttccggatgcgcagcaacatactcaagtgcagtctgccagttacgcttgttgccctgattttcggcataggggaagtggcgacggaagcaataacggcaatttaccgcgcagccgcctttgaccagcaaaagcgcccggttgtggtatttatgcaacaaaccaggcactacgctgtgctgttcttccagtgggtcggtggagaatccgggggcgacgacaaactcatcttgcgaggtaagtacctgacgcaaaagaggatcgtccggattgcctttctccattcgatcgataaatgagcggggcacacgcagggcaaacagctttttggcgctgcgtccggccaacagtttttcctccgcgtctatattcaaaagacgcagaagttcatcaggatcggtcacaacatcggcaagttgcgttaaccaatcttctctggatggggtatttagggttacaatatgcgccattttgtggcttagctaccaattaacaaatttcagagggccttatggcaacgtactatagcaacgattttcgtgctggtcttaaaatcatgttagacggcgaaccttacgcggttgaagcgagtgaattcgtaaaaccgggtaaaggccaggcatttgctcgcgttaaactgcgtcgtctgctgaccggtactcgcgtagaaaaaaccttcaaatctactgattccgctgaaggcgctgatgttgtcgatatgaacctgacttacctgtacaacgacggtgagttctggcacttcatgaacaacgaaactttcgagcagctgtctgctgatgcaaaagcaattggcgataacgctaaatggctgctggatcaggcagagtgtatcgtaactctgtggaatggtcagccgatctccgttactccgccgaacttcgttgaactggaaatcgttgataccgatccgggcctgaaaggtgataccgcaggtactggcggcaaaccggctaccctgtctactggtgctgtggttaaagttccgctgttcgtacaaatcggcgaagtcatcaaagtggatacccgctctggtgaatacgtctctcgcgtgaagtaatgcggttgtggtgcggcctgcaggctgcaccatcacttattcaggtcagagatgatgaaacgccttatcgttcttgttttgcttgccagcacgctgctcacgggctgtaacaccgctcgcggtttcggcgaagacatcaaacatctcggcaactccatctcccgcgctgccagctaatttttcttctcttccgaaaaatcatcagatttccgtcatttttggcgatgttgtctattattaatttgctataggcaaacataaataacattacctaaaaggaagacgttatggtgaagaagacaattgcagcgatcttttctgttctggtgctttcaacagtattaactgcctgcaacaccacgcgtggcgttggtgaagacatttctgatggcggtaacgcgatttctggcgcagcaacgaaagcgcaacaataagcaataacggtacgacagctgtgtcgtgccgtttgttttttctgtgatagtcataaaggtaatagttgaaattcccctgccacctggcaaaatatccgttcaaccatcagctttgcaggacgacctgcaaacgcgtcttttcaccggggacggccccaattttccggagcctgatatgtcctggattatcttagttattgctggtctgctggaagtggtatgggccgttggcctgaaatatactcacggctttagtcgtttgacgccaagtgttattaccgtgacggcgatgattgtcagtctggcgctacttgcctgggcgatgaaatcgttaccagtagggacggcttatgccgtgtggacgggtattggcgcagtcggcgcggccatcaccggcattgtgctgctcggtgagtccgctaacccgatgcgcctggcgagtctggcgttaatcgtattggggattattggtctgaaactcagcactcattaactaccgggctgctgtacccaaataaacttactgacatcaaacccttcccgggtcgcgactgccagcatctcctgtttcacttcgtcagaaatggttggcgtgcgggagagtatccacaggtagtcgcggtccgggccgcaaaccagcgcatggcggtattcccgatcgagtgcaataacgttataaccgccatagaaaggaccaaagaatgacactttcagcgcagcgcgagttggtgcgccggtaaagtacgctttcccttcactctgctgccacatttctctgtcagggttatagcctttattaatgacattcaggccgccgtcatcacgcaggctgtatgttgcggtgactttttccagtccacgttcaaagcggtgatcaaaacgggcaatctcataccaggtaccgagataacgtttagcgtcgaaattattcactacggtcacgccacgcggcggcgtaggggaactgcaggcaacgaccagaaatgcagctgtcgctgcggcaacgagagggagcaggcgcataaatgtttccttactggtttttttctaagtgtagatgacagcaaggaaaagcggagaaaaggtccgaaaattcggacccgatgaaattttactgtagagcgttgagaatctgccaggcggcggcgactctcgctggattggggtagtttttgttagccagcatcacgatacccagctctttttctggaataaacgcgacatagctaccaaatccgccggtcgcccccgttttatgtacccatgatgcgcgtactgcaggagttgggggcgtaatcggttttacggggcgtgctgccagtgcaattttattgtcactgccgttaatgatgatgtcaggatttaccggccagtccagcatttcccagcccagaccctgatacatatcgccggtttgccagtagcgagattgtgccagttgtatcccttgttgaagtgttttctcattgatatcaaggggttttaaattgctttgcacccagcgggccatatcttcaatggtcgacttcacaccataagcttcagcatctaacgcccctggcgaaacatgtactgccttaccttcgcgatatccccaggcgtagttcttttcttctgcggacggtacattaatccacgtatgattgagtttgagtggctggaagacacgagttttcatcgcctgctcaaaactcaaaccagacggcttcacagccagtgcgccgaacaaaccgatactggagttggcatacagacgttgtgttcctggagcccatgcaggctgccagttttgatagaagcgcagcaagtcgcttgaggatttcacctcatccggcacctgcaatggcaggccgccagcggtgtaggttgcgagatgtaatagtgtgatcccattccactgtttagcggtaagttcaggccagtattttgttgtgggatcgcttaacttgatttcccctcgagcaatagcgtcgccaccaagcacgcccgtaaatgttttgctgaccgaacctaactcaaacaacgtttgctgtgtgacgggctgctttttggcgatgtccgcatagccccaggtaaagtaataaggtttaccctgataaattaccgctaccgccataccggggatcttttgttgctctataagcggggtaattgtgcgatgcacaatatcgttgatttgttgaggggcggcaaatgtggagcaagaggcggtaattaataaggtgcagagcgtcgttttgaacatagggtctggtttccatacaaaacggcccgccataggcgggccggatttacattggcgatgcgttagattgtaacgacaccaatcagcgtgacaactgtcaggatagcagccagaccgtagaaaacccatttacccgcaggtacgtggattttcagatcgtgcatcgcgtggtgcatacggtgtaaaccacaccacagcggcagaacgatcatcaggaacaggaatacgcgaccaatgaagctctgcgcgaacgccagaacgcgctcgtagctcagtgcatcacccggaaacagccctagcggcagcagaataccaaccagcaggatcatcaccggcgcaatgatggcgctccacataccaccggccccgaagaggccccagaataccggttcgtcagaacgctttggatttggattaatcatctcaggctccttaccagtacagggcaacaaacaggattacgatggtggcaaccacagttaccgcccagagacttttgataattggctctggtcccattttttcgtcttttacaatgatattggctgcttttggtgccagctcaaaccaggttttggtgtgcagcagggctgccgccagagtgatcaggttaatgatcacgataaccgggttttgtaaaaagtcgacgaatcccgcccaggcttccgggccatttttcagggcaaacagcccgaaaatcagttcaatgctgaaccacacagccggaaccgccgtgccttcgcgcagcatgtaaaagcgataaaacggcaattttttccaccaggtggacgtcattggccgtacatacggtttacgtttagtcgtcatgttgcactccttagcgtggtttcagggtcgcgataagaaagtctttcgaactttctactttgccctgctgaatggccgcagccggatcgacgtgtttcgggcagacttcggagcagtagcccacgaaagtacagctccatacgccgttctggctgttcaactgcgccatacgctccttcttaccgtggtcgcggctatcttcgttataacgatgcgccagcgtaatggcagccggaccgatgaactctgggttcactttttggcgatgtccgcatagccccaggtaaagtaataaggtttaccctgataaattaccgctaccgccataccggggatcttttgttgctctataagcggggtaattgtgcgatgcacaatatcgttgatttgttgaggggcggcaaatgtggagcaagaggcggtaattaataaggtgcagagcgtcgttttgaacatagggtctggtttccatacaaaacggcccgccataggcgggccggatttacattggcgatgcgttagattgtaacgacaccaatcagcgtgacaactgtcaggatagcagccagaccgtagaaaacccatttacccgcaggtacgtggattttcagatcgtgcatcgcgtggtgcatacggtgtaaaccacaccacagcggcagaacgatcatcaggaacaggaatacgcgaccaatgaagctctgcgcgaacgccagaacgcgctcgtagctcagtgcatcacccggaaacagccctagcggcagcagaataccaaccagcaggatcatcaccggcgcaatgatggcgctccacataccaccggccccgaagaggccccagaataccggttcgtcagaacgctttggatttggattaatcatctcaggctccttaccagtacagggcaacaaacaggattacgatggtggcaaccacagttaccgcccagagacttttgataattggctctggtcccattttttcgtcttttacaatgatattggctgcttttggtgccagctcaaaccaggttttggtgtgcagcagggctgccgccagagtgatcaggttaatgatcacgataaccgggttttgtaaaaagtcgacgaatcccgcccaggcttccgggccatttttcagggcaaacagcccgaaaatcagttcaatgctgaaccacacagccggaaccgccgtgccttcgcgcagcatgtaaaagcgataaaacggcaattttttccaccaggtggacgtcattggccgtacatacggtttacgtttagtcgtcatgttgcactccttagcgtggtttcagggtcgcgataagaaagtctttcgaactttctactttgccctgctgaatggccgcagccggatcgacgtgtttcgggcagacttcggagcagtagcccacgaaagtacagctccatacgccgttctggctgttcaactgcgccatacgctccttcttaccgtggtcgcggctatcttcgttataacgatgcgccagcgtaatggcagccggaccgatgaactctgggttcaggccaaactgcgggcacgcggcgtagcacagaccacagttgatgcaaccggagaactggtgatacttcgccatctgcgccggggtctggatgttagtaccctgatccgcggtgcgggagttgccgatgatgtacggtttgatcgcttccagactttcgatgaagtgagtcatatcgaccaccagatcgcgttcaatcgggaagttagctaacgcttcaaccttcataccgtcggtgtaatcacgcaggaaggttttacatgccagttttggcacgttgttaaccatcatgccgcaggagccacaaatcgccatacggcaggaccagcggtagctcaggtccggtgccaggttgtctttgatgtagcccagcgcatccagtaatgaggtagttgcgtcataaggcacttcatagaatgcgctatgcggtgcggtatcgacttccgggttatagcgcaccacctcaattttcaggtttttcatctcagccattcgccttctccttcttattggctgcttccgccttatcggctgcatccgcttcgccaccgtaaacacgtttagctggcggcagcgtagtaatcttcacgtcgctgtactccaggcgagtcgtgccatcagcatcgcggaaggcgagggtgtgtttgaggaagttgacgtcgtcacgctcggtgcaaccttcgtccagacgctggtgcgcgccgcgggactctttacgtgccattgcggagtgcgccatacattcagcaacgttcagaccgtggcccagctcaatggtgtagagcaggtcggtgttgaacacgctggaagtgtcggtgatgcgcacgcgcttgaagcgttcctgcagctctgccagcttgtcgatggttttctgcatcagttccggcgtacggtagataccgcaaccttcttccattgccatgcccatttcgtcgcggatcttagcccagttttcgccgccatcctggttaaccagatctttcagacgttgttcaacgccagctgcctgcgcttcaattgccgcttcgttgccattaccggcagttgctgcacgctctgtcgcttgttcaccggccagacgaccgaagaccaccagttccgccagcgagttggagcccagacggttcgcaccgtgcagaccaacagaggaacattcacccacggcgaacagacctttaatgcgggtttcacagttctgatcggtttcgataccgcccatggtgtagtgtgcggtcggacgtaccggaatcggttctttaaccggatcgacgccaacgtacgctttcgccagttcgcagatgaacggcagacgttcatgcagttttttctcgccgaggtgacgcaggtcgaggtaaaccacatcgccacgtggcgtggagatggtgttgcctttacgccattcgtgccagaaggcctgagaaactttgtcgcgtggacccagttccatatatttgtttttcggctcgcccagcggagtttccgggcccatgccgtaatcttgcagataacggtagccatttttgttgaccagaataccaccttcaccgcggcagccttcggtcatcaggataccggaacctggtagaccggttgggtgatactgaacgaattccatgtcacgcagcggaacgccgtggcttagcgccatacccataccgtcaccggtaacgatgccgccgttggtgttgtaacgataaacgcgacccgcaccgccggtagccataacgaccgcgttagcacggatctgcaccagcgtgccttccatcatgttcattgctaccaggccgcgaacatgaccatcatcaaccagaatatccagcacgaaatgttcgtcaaaacgctggatctgcgggaattgcagagaggtctggaacagcgtgtgcagcatatggaagccggtcttatcggcggcgaaccaggtgcgctcgattttcatgccgccgaagcgacgtacgttgacgctaccatccgggcgacggctccatgggcacccccacagttccagttgggtcatttcggttgggcagtggtggacgaaataatccacgacatcctgctcacacaaccagtcgccacccgctactgtatcgtgaaagtgatattcgaagctgtcatgatcctgcgcgacagcggcggagcccccttctgcagcaacggtatggctacgcatcgggtatacttttgagattagtgcgatttttgcatttggatttgcctgcgcggcagcaattgcagcacgtaatcccgcgccaccggcgcctacaatggcaagatcggcttgaaaggtttgcacgacattcctccagattgtttttatcccacagccccgtacttcagggtaagtgcctgaaagttacggtctgcgaacgctattccactgctcctttataggtacaacagtatagtctgatggataagtctgaaatttgacgagatcgatttttttagtgcgcaagagggctaaattatcactgaagatgattaatttaattactaaaccatcagatcgtgctttttttagtcactgcccaccgttgtgttattcctgcgtaaaatttgtctcgccgtcgcgttgcgagtagacttcgtgcccttgtcaaaaactggagatttaactatgagcgaaacggcatcctggcagccgagcgcatccattcctaacttattaaaacgcgcggcgattatggcggagatccgtcgtttctttgccgatcgtggagtgctggaggtggagacgccttgtatgagccaggcgacggtaaccgatattcatttggtcccgtttgagacacgtttcgttggccccgggcattcgcaggggatgaatctctggttaatgaccagcccggaataccatatgaagcgcctgctggttgccggttgtgggccggtattccagctgtgccgcagcttccgtaatgaagagatggggcgttatcacaaccctgagttcactatgcttgagtggtatcgaccgcactatgatatgtaccggttgatgaacgaggtggacgatctcttgcaacaggtgctggactgtccggcagcagaaagcctttcttatcaacaagctttcttacgttatctggaaattgacccactctctgccgacaaaacgcaactgcgggaagtggcagcgaaactggatttgagcaacgttgccgatactgaagaagaccgcgacacgcttctacaattgctgtttacctttggcgtagagccaaatattggcaaagaaaaaccgacctttgtgtaccactttccagccagccaggcatcactggcgcaaatcagtaccgaagatcatcgggtcgctgaacgctttgaggtttattataaaggtattgagctggcgaatggtttccatgaattgacggatgcccgtgagcagcaacaacgctttgaacaagataaccgtaagcgcgcggcgcgcggtttgccgcagcaccccattgaccagaatctgattgaagccttgaaagtcggtatgcctgactgttccggcgtggcattaggtgttgatcgtctggtgatgttggcgctgggcgcggagacactggctgaagtcatcgcctttagcgttgaccgggcataattctgaaaaattactgaattaacagcgaagaatggcgtgataagcgccattctgtagcatatgttttcatttttccgctaaaggccacaatttaagactggatatttgatatcatccaggtatcaattctgtattggtttttacgctgcccgctcaatgttgggcagtgcagttcagtgggcgcgttttatacacgcgctgaaatgaaggatggtttcatgcctcactcgataaaaaagatgagtctgataggactcatattgatgatctttacttctgtatttggatttgccaatagcccatcggcttattacttaatgggttatagtgcgattcccttttatatattttctgcattgttattctttattccattcgccttaatgatggctgaaatgggagctgcttatcgcaaagaagaaggcggtatctattcctggatgaataatagtgtcggaccacgttttgccttcattggtacgtttatgtggttttcctcttatatcatctggatggtgagtacctccgcgaaagtttgggtaccgttctcaacattcctctacggtagcgacatgacccagcactggcatattgccggactggagcctacgcaggtggttggtctgctggcagtggcatggatgattctggtcaccgtcgttgcttcaaaagggattaataaaattgcccgcattactgcggtgggcggtattgcagtaatgtgtctgaatttagtattgctgttagtaagcattactattttgttattaaatggtgggcatttcgcgcaggatattaatttccttgcatcaccgaacccaggttatcagtccggtctggcaatgctatcgtttgtggtatttgccatttttgcctatggcggaattgaagcggttggtggtctggttgataaaacggaaaatccagaaaagaactttgccaaaggtattgtttttgccgctattgttatttcaatcggttattcgctggcaatatttttatggggcgtcagcacaaactggcagcaggtattaagtaatggttccgttaacctcggcaatattacctatgtgctgatgaagagcctcggggtgacgctgggtaacgcactgcatttttcacctgaagcgtcattgtcgctgggcgtatggtttgcgcgtattaccggactttcgatgttcctcgcttataccggggcgttctttacgctttgctattcaccgctgaaagccatcatccaggggacgccgaaagcattgtggccggaaccgatgacgcgcctgaatgcgatggggatgccgtctatcgccatgtggatgcagtgtgggttggttactgtcttcatcctgctggtttcgtttggtggcggtaccgcatcggcgttctttaacaagctgacgctgatggcgaacgtgtctatgacgcttccttacctgttcctcgcgctggctttcccgttctttaaagcacgtcaggatctcgacagaccgtttgtgattttcaaaacgcatttgtcggcaatgattgcgacggtggttgtcgtactggtggtgacatttgcgaacgtcttcaccatcattcaacctgtggttgaagctggagactgggacagctcattgtggatgattggcggccctgtcttcttctcgctgttagcgatggcgatttaccagaactattgcagtcgcatggcgaacaaacctgagttagctctcgactgatcatatgaaatcctgcaactcatcgtctctccggcgatgagttgtcaggaagtaatgcgtatggatgatactctccggggccagtgataactgaagatgatgttaagctgctaaatgagccacgttgacatcatttggcagcttcatgcattacaaacttcccgcctgacgacctttgcccgcagaagttaatgttctccccgtttgtttaccattcaggctttccagacgcatctggaagggcgggaatggcatatcgataccgtgggcgtggaagcccgccagaattagttggtggatctcatggcgtagcggcatacggtgacccatctcagcggcgtaaatacgcagctcgaaaatttgaatcccctgttgcagatccaccaggaagacttccggcgccgggttgtcgatcaccagcgagcagcgacgcgctgcggtgagcaggatttccgtcacttcttcactgttagcatcggcaggggccggaatcgtcaataccacgcgcgtgaccgagtcagagagcgaccagttgataaactgctcggtaataaacgccttgttcggcacgattatctctttacggtcccagtcgctgatggtggtggcgcgggtgttaatttttgtcacgctaccggtgagatcgcggatcgttaccgtatcgccaatacgaatcggtttttcgaacaggataatcaggccagagataaagttggcgaaaatctcctgtaaaccaaagcccagaccaacaccgagcgcggcgaccagccactgcaatttcgaccactcaataccaatcatcgagaagccgaccagcccgccaatcagcatcagcagatatttggtgatggtggtgatggcgtagcccgtacccggcgttaaatccaggtgctgcagaatcgccagttccagcagcgcgggcaggttgcgcaccagctgcgtggtgatgataaacaccagaatggcaatcagtaccgcaccgagggtaatcggctccaggctttctacgccctgtaccgtggaagtgacatcccacagcgaaatattttcgaggaagccgaaagcggaatggatttctgaccacagcacaatgaccgaaagcagggcgatcaacatcaaaattgagcgcaccagccgcaaggattgcgcactgatggcatcgagatcgacttcgctttcatcgacttcaattgctccttccgggctactgtgatgatgcgcttcctcttcgccacgcgcacgctgcgctaacatctctgcccggcgatgcttcgcccggtcaaacgccagcctgcggcgctggatcagcatccagcggcggataacgtgataaaccaccagtagcaggaaccagatggcaaccgaggtttcaagcctcgctaacagtgcctgcgccgttgccagataacccaccgccgacgccagaatggcaaccagcggtgcgccaatcatcatgttccacagcatatggttggtaatgttgtcgccgctgccttctttgttgagatacagcgggatcccggcctttttcaggctgagggtgaccaccgccagcgcaccgcaaatgaggataaagcaaagccgtcccagcgaaccggaaaattcgcggtcgtcgaggttatcgaacatcatcagcgccataatcagcggcacaatgagcccgatgctcatcaggtagtaacgcatcccacgggaaactcgttcgcgcggccagccaaaatgagcgataaacaagccgttcgggcgagcaaaggtggcgcaaatcatcactacccacagcagcggcacggtggctgttacgccatcaccaatcgcgaccgccagcggataaggccacgcctcgcgcaagccgtaacccagcgtcatccacagcacaggcagcggtgacgcgacgagaatcgaccagaaaagagtgcgtaacgtcagccagaagtgatcctgagtcactttgccgactttcgccgccgaacgttcaagaaaacgggtgaaatagcggcgcgagtaaatactgcaaccgaccagaatcaacgcgccaaacagcggcaaaatcgtctctttactggtcagcatcatcacactggctttgcccaactgactgaaggtgtccagcgaaatgagacgacgcagatcctgggcgatttccagcggccaggcgatggtcatcgggcgcacgtcagaggtccagaacagatagcggtgcgtcgcttcgttcacctctttcagcgcatcctccagttgcccgttggagactttcagcttggtcagctccagcagtagcgtgtcgccaccctgcaacaatgagttcagcaactcacgctgagtgcgtagctgtgcttccagaatacggttttgctcagcggtcagtggctgaccgtcggcctgatggatttgccgtagcagcggctgtttattaagcagatcctcataacgtaaccgttgcacacgtaactgcgccatttcggtatcaagctgttgtggttttggcatttccggtagccgtgccacctgcgcccgcaacgcttcgccgagcaggttagatgatcccagccattgcgactgttcacgcagcgtattcaacgcctgccggacctgtaacgtctggctggcagcctgacgctgttgcgaggcaacgagatccatccgctgcgcctgttgattcagcgccgccgatagttcgcggttaattttaaactgggcgacgatatcttttggcaaatcggcgctactttccgccagttgctcggtactttccagcgcccgttccgcttccagttggcgttgactattcaactggttgcgtagtgcttgcaaatatgcatccagctgctggctctctttttccgccagctcagagcgcaagcgcgctaattcctggcggttattggcagatagctgcgccagctccagttcatcaacgagcgctttcagacgtgcggagtcagactgcaacgcgaaattttgtgcctgattgagcggggtattgccggtaagcgtccccaggcggcgctcgatttcattcaactgacggcgggcatcggtttgctgttgcggcagttgattcagcgaatcggcaatctcgcgggcgcgctcctgctcttgctgggcctgacggcttttatccagcaactgactgctgatctggagaatttcctgattcagcgcatcgttagacattcccggcgacacgctgcgtggctcgtcacgcatgttgtttaactgcgcgcgcagagtggcggaaattttcggataattatcaatgacttcttgatattgcttgatgcgctcaagggaaccttttcgttcctcaagcgcatttaaggcagactggagcgcctctacgacttccggctgcgcgggtttcgccgcttttgcctgctccagttcctgggtgatttgtttgctatcgggggccgtcgcggcgtacgccccccaactgaggcaccaggccatcagaaaagtgataatcaggcgcacgtcagcgtttcctttgatggattagacctggtcttttttgtcgtcaaccaatgggctggcgtcgtgttctgcttcgatctcttcagcaggaagcggggctggttcagcgtctggcgtaacaaaggtttcggtagatactgccagcggctggccaattttcgtgacagacaggctttccagttgctcaaccaggttcactttacctggtgcaaacaggttgataacggtagagccaagtttaaagcgacccatttcctggcctttcagcaatgccacagaaccgtcgttttccccggcaggccaggtccagcgcttgatgatgccttcgcgcggcggcgtaatggtgcccgcccagaccgtctcaatgctgcctacaatcgtcgcaccgaccagaatctgcgccatcgggccaaattcggtatcgaacaggcagatcacgcgttcgttacgggcaaacagattcggcacgttctgagccgtgagatggttaacggagaagagatcgcccggcacgtagatcatttcacgcagaataccgttgcacggcatgtgtacgcggtggtagtcacgtggggagaggtaagtggtcacaaacgtaccgttacggaagagatccgccatcagatagttgcctgccagcagggcttcgaggctgtagttgtggcctttggcttgcaggattttatcttcttcgattttacccaactggctgataacgccatcggcaggcataaccagtacattcggatcggtatcgattgggcgtacttcgtcacgcagcggacggacaaagaattcgttaaaggtgcggtagctggcggtgtccggcttttgcgcctctttcatgtcgaccttgtagtatttaacgaacagatcgataaccagttttgtcagccatcctgcccgcttgcttgcgccccaacccgccaggcgagtaagccatagtttcggcagaatgtactgtagcgaaagtttaaatgaatttaacaaggtagcctccaggccattgttttgtcgttcctgatccggcctacatgccggatcctgaaaaaaaggggacgattctaacgacggttagcttaattgtcagtcatccgtatcagaaaagtttttacgcgtttttacctgcgccatgctttccagaatacggtgatagttttcgaaacgggtttccgcgatttttccttcctcaaccgcttcccggatagcgcagcccggatcggtatcgtgtttgcaatcgcgatatttacacagacctaaatagtcatggaattcgacaaagccctgagtgatttgttccggctccaggtgccagagaccaaactcacgcacacctggggaatcaatcacatcaccgccgtgcgggaagtgatacagtcgtgcggcggtcgtggtgtgctgaccaagccccgagttgtcagagacatcgttggtcaggatctctttttgcagccccagcaacgcgttcagcaggctggatttgccaacgccagactgcccggcaaaaatgctgatgcgcccggtcaacgcctcttccagcggtttcagcccatcctgagtatgactggaaaccatcaatacgcgataaccgatattgcggtagatatccatctgctcgttgacgaactccatgccttcgtcgtccagcaggtctatcttgttgagcacaataatcggctcaatctgcaaggtttcgcaggccaccaggtaacggtcgataatattgagcgacagctccggcaaaatggcggagacaatgacaatctggtcgatgttggcagcaataggtttcacaccgtcgtaaaaatccgggcgcgtcaacactgaggtgcgctcatgcaccgcttccacgatccctttgacatttacgccttccgccgctggtttacccggacgccagactacgcggtcgccggtcaccaacgaacggatggtacggcgaatattgcagcggtgaacgtcgccatcggcggattccacatcagcgtgcataccaaagcggctgatgacgataccttcatcaggctcgccaaacagattgtcgtcgtagtcgggcttctccttagacgttttaagacgacgctggtgattggcgttcacgcggcgctgctggcctttggagagtttatttttactcaatcgtacagactcctggtcgcccctgatgggcaaaacatctatgatacacgcaattgtggatcaatatagtcactgtgaatgggtggaaaatagcatgagtgccaatgaaaacaacctgatttggatcgatcttgagatgaccggtctggatcccgagcgcgatcgcattattgagattgccacgctggtgaccgatgccaacctgaatattctggcagaagggccgaccattgcagtacatcagtccgatgaacatctggcgctgatggatgactggaacgtgcgcacccataccgccagcgggctggtagagcgtgtgaaagcgagcacgatgggcgatcgtgaagctgaactggcaacgctcgaattcttaaaacagtgggtgcctgcgggaaaatcgccgatttgtggtaacagcatcggtcaggaccgtcgcttcctgtttaaatacatgccggagctggaagcctacttccactaccgctatctcgatgttagcaccctgaaagagctggcgcgccgctggaagccggaaattcttgacggctttaccaagcaggggacgcatcaggcgatggatgatatccgtgaatcggtggcggagttggcttactaccgcgagcattttatcaagctgtaaaatttttcctggtcacgtaagcgccggaatccacttgcggcggcgtgattttgacgctaaattgaacgtcttgctgataatttcagcacttgagataaaaactcaaaaaaaattttttaggggggttgcagagggaaagatttctcgtataatgcgcctcccgtaacgacgcagaaatgcgaaaattacgaaagcaaaattaagtagtacgcgggaatagctcagttggtagagcacgaccttgccaaggtcggggtcgcgagttcgagtctcgtttcccgctccaaaatttgaaaagtgctgtaaagcacagaccacccaagcgggaatagctcagttggtagagcacgaccttgccaaggtcggggtcgcgagttcgagtctcgtttcccgctccaaaatttgaaagtgctgtaaagcacagaccacccaagcgggaatagctcagttggtagagcacgaccttgccaaggtcggggtcgcgagttcgagtctcgtttcccgctccaaattcttctctcaataaaatatccacagcgacgcgatgcgttattgctggtttttgatgtctctgacagactcttgtaaacagagttatccacagcctcaggccgtaatcttaatttcaaagaaacttcgcacggtgaatagtatttttttaacctattgatagataagttaaaaattaagatttcgttttgtcgtatcgatcacttgacgattttttccggcttgaattgcaatgcgtttttatttttattcacaagctgtggatgaatcaggcgtcacgcggtaaccctttttcaatcacccgaaccagacgctgttttttcggtaattgcacttcgaccacgcacgcatttcgcctctcgatttgctgcgcaatcgcccacgctatgtgctcatcaagaagtgggtgctcacctttacgactttccagcgctgtcaaaatcgtttcatcccagggggcattgcctaatgctacggcgatattacgcagccaacgcaggtgacctatacggcgaatcgccgaaccttccgtgacttttaaaaacttctcttcactccaggcgaataactcaatgagttccggtgcgtgtagcggcttacgcgggctgaaatcgtcttctgtagtgagttgcgaatagcgattccacgggcagataagctggcagtcatcgcaaccgtaaatacggtttcccattaacggtcgcaactcttccgggatcgccccttccagttcgatggtgagataagagatacagcggcgagcatcgacggtatatggctcgacgatggctccggtcgggcaaatcgtcatacaggccacgcatttaccgcatccttcctcgactggttgatccacaggcagcggaatatcgaccagcaattcgcctaaaaagaagaacgaaccggcctcgcgattgaggataagtgagtgcttacctgtccagccaagacctgctttttcagctaacgggcgctcgagaataggcgcagaatcgacaaacggtctaaaattcagcgaaacacaatgttgctgaatcatctcgcccagctttttgagtcggttgcgcagaagcttgtgatagtcacggcccagcgcataacggctaacatagccgagtttgggatttttcagcgtgctggcaaatgcggcgttagcaggaaggtaattcatccgcacgctgatcacgcgcagcgtaccgggcaataattcgtgaggacgagcacgcagcataccgtgacgcgccatccagtccatttcgccgtggtattgtttgtccagccatgcttgcagtttgggctcggacgcgctgagatcggtatcggtaatacctacctgctgaaagcccagttccagcccccactgtttaattttttgcgctaactgattgagatcgaggggctctgacatgacggaccatacaatgaagaaaaaccccgtaagtataccacacacagtctggtacgccgacgatatccgccgcggagaacgcgaggcggcagatgcgctggggctcacactctatgagctgatgcttcgtgctggcgaagccgcattccaggtgtgtcgttcggcttatcctgacgcccgccactggctggtgctgtgcggtcatggtaataacggcggcgatggctacgtggtcgcgcggctggccaaagcgatcggtattgatgtcacgctgctggcccaggaaagtgacaaaccgttgccggaagaggccgcgctggcacgcgaagcatggttaaacgcgggaggcgagatccatgcttcgaatattgtctggcccgaatcggtagatctgattgttgatgcgctgctcggcaccggcttgcagcaagcgccccgcgaatccattagccagttaatcgaccacgctaatactcaccctgcgccgattgtggcggttgatatcccttccggccttctggctgaaaccggcgctacgccaggcgcggtaatcaacgccgatcacaccatcacttttattgcgctgaaaccaggcttgctcactggaaaagcgcgggatgttaccggacaactgcattttgactcactggggctggatagctggctggcaggtcaggagacgaaaattcagcggttttcggcagaacaactttctcagtggctgataccgcgtcgcccgacttcgcataaaggcgatcacgggcggctggtgattattggtggcgatcacggcacggcgggggctattcgtatgacgggggaagcggcgctgcgtgctggtgctggtttagtccgagtactgacccgcagtgagaacattgcgccgctgctgactgcacgaccggaattgatggtgcatgaactgactatggactctcttaccgaaagcctggaatgggccgatgtggtggtgattggtcccggtctgggccagcaagagtgggggaaaaaagccctgcaaaaagttgagaattttcgcaaaccgatgttgtgggatgccgatgcattgaacctgctggcaatcaatcccgataagcgtcacaatcgcgtgatcacgccgcatcctggcgaggccgcacggttgttaggctgttccgtcgctgaaattgaaagtgaccgcttacattgcacccaacgtctggtacaacgttatggcggcgtagcggtgctgaaaggtgccggaaccgtggtcgccgcccatcctgacgctttaggcattattgatgccggaaatgcaggcatggcgagcggcggcatgggcgatgtgctctctggtattattggcgcattgcttgggcaaaaaatgagcccttatgatgcagcctgtgcgggctgtgtcgcgcacggtgcggcagctgacgtactggcggcgcgttttggaacgcgcgggatgctggcaaccgatctcttttccacgctacagcgtattgttaacccggaagtgactgataaaaaccatgatgaatcgagtaattccgctccctgatgagcaggcaacattagacctgggcgagcgggtagcgaaagcctgcgatggcgcaaccgtaatctatctgtatggcgatttaggtgcaggtaaaaccacctttagccggggctttttacaggctctgggtcatcagggtaatgtcaaaagccccacttatacgctggtcgaaccctatacgctcgacaatttactggtttatcactttgatttgtaccgccttgccgatcccgaggagctggagtttatggggatccgcgattattttgccaacgatgccatctgcctggtggagtggccacaacaaggtacaggtgttcttcctgacccggatgtcgaaatacacattgattatcaggcacaaggccgtgaggcgcgcgtgagtgcggtttcctctgcgggtgaattgttgctggcgcgtttagccggttaacctttgaaaggtggcgggatgatgtatcgcatcagaaattggttggtagcgacgttgctgctgctgtgcgcgccggtgggtgccgcgacgctctctgatattcaggtttctaacggtaatcaacaggcacggataacgttgagttttattggcgatcctgattatgcgtttagccatcaaagcaaacgcaccgtggcgctcgatatcaaacaaacgggggtaattcaggggctgccgttgttgtttagcggcaataatctggtgaaggcgattcgctctggaacgcctaaagatgcacaaacgctacggctggtggtcgatctcaccgaaaacggtaaaaccgaagcggtgaagcggcagaatggcagctattacactgttgtctttacgattaacgccgatgcgccgccatcgcctccgccaatggttgcgaaacgcgttgaaacgcctgcggttgtcgcaccgcgcgtcagcgaaccggcgcgcaatccgtttaaaacggaaagtaaccgcactacgggtgttatcagcagtaatacggtaacgcgtccggcagcgcgcgcgacggctaacacaggcgataaaattatcatcgctattgatgccggacacggcggtcaggaccctggcgctatcggccctggtggtacacgggagaaaaatgtcaccatcgccattgcgcgtaaattacgtaccttgctcaataacgatccgatgtttaagggcgttttaacccgtgacggggattattttatctcggtgatggggcgcagtgatgtggcacgtaagcaaaacgccaatttccttgtgtcgattcatgccgatgccgcaccaaaccgtagtgccaccggtgcctctgtatgggtgctctctaaccgtcgcgccaacagcgaaatggcaagctggctggagcagcacgagaaacagtcggagctactgggcggagcgggcgatgtgctggcgaacagtcagtctgacccctatttaagccaggcggtgctggatttacagttcggtcattcccagcgggtagggtatgatgtagcgaccagtatgatcaatcagttgcaacgcattggcgaaatacataaacgccgaccagaacacgcgagtctcggcgttctgcgttcgccggatattccgtcagtactggtcgaaaccggttttatcagtaacaacagcgaagaacgtttgctggcgagcgacgattaccaacaacagctggcagaagccatttacaaaggcctgcgcaattacttccttgcgcatccgatgcaatctgcgccgcagggtgcaacggcacaaacggccagtacggtgacgacgccagatcgcacgctgccaaactaaggacgattgatgccaattcaggtcttaccgccacaactggcgaaccagattgccgcaggtgaggtggtcgagcgacctgcgtcggtagtcaaagaactggtggaaaacagcctcgatgcaggtgcgacgcgtatcgatattgatatcgaacgcggtggggcgaaacttattcgcattcgtgataacggctgcggtatcaaaaaagacgagctggcgctggcgctggcgcgtcatgccaccagtaaaatcgcctctctggacgatctcgaagccattatcagtctgggctttcgcggtgaggcgctggcgagtatcagttcggtttcccgcctgacgctcacttcacgcaccgcagaacaacaggaagcctggcaggcctatgccgaagggcgcgatatggacgtgacggttaaaccggcggcgcatccggtgggaacgacgctggaggtgctggatctgttctacaacaccccggcgcggcgcaaattcctgcgcaccgagaaaaccgaatttaaccatatcgatgaaattattcgccgcattgcgctggcgcgtttcgacgtcacgatcaacctgtcgcataacggtaaaattgtgcgtcagtaccgtgcagtgccggaaggcgggcaaaaagaacggcgcttaggcgcgatttgcggcaccgcttttctcgaacaagcgctggcgattgaatggcaacacggcgatctcaccctgcgcggctgggtggccgatccaaatcacactacgcccgcactggcagaaattcagtattgctacgtgaacggtcgcatgatgcgcgatcgcctgatcaatcacgcgatccgccaggcctgcgaagacaaactgggggccgatcagcaaccggcatttgtgttgtatctggagatcgacccgcatcaggtggacgtcaacgtgcaccctgccaaacacgaagtgcgtttccatcagtcgcgtctggtgcatgactttatctatcagggcgtgctgagcgtgctacaacagcaactggaaacgccgctaccgctggacgatgaaccacaacctgcaccgcgtgccattccggaaaatcgcgtggcggctgggcgcaatcactttgctgaaccggcagttcgtgagccggtagctccgcgctactctcctgcgcccgcctcaggcagtcgtccggctgcctcctggccgaatgcgcagcctggttaccagaaacagcaaggtgaagtgtatcgccagcttttgcaaacgcccgctccgatgcaaaaaccaaaagcgccagaaccgcaggaacctgcacttgcggcgaacagtcagagttttggtcgggtactgactatcgtccattccgactgtgcgttgcttgagcgcgatggcaacatttcacttttatccttgccagtggcagaacgttggctgcgtcaggcacaattgacgccgggtgaagtgccagtttgcgcccaaccgctgcttattccgttgcggctaaaagtttctggcgaagaaaaatcggcattagaaaaagcgcagtctgccctggcggaactgggtattgatttccagtccgatgcgcagcatgtgaccatcagggccgtgcctttacccttacgccaacaaaatttacaaatcttgattcctgaactgataggctacctggcgaagcagtccgtattcgaacctggcaatattgcgcagtggattgcacgaaatctgatgagcgaacatgcgcagtggtcaatggcacaggccataaccctgctggcggacgtggaacggttatgtccgcaacttgtgaaaacgccgccgggtggtctgttacaatctgttgatttacatccggcgataaaagccctgaaagatgagtgatatcagtaaggcgagcctgcctaaggcgatttttttgatggggccgacggcctccggtaaaacggcgttagccattgagctgcgtaaaattttaccagtagagttgataagcgttgattctgcccttatttacaaagggatggatatcgggacggcgaagccgaacgctgaagagttactcgccgcgccgcaccgattgctgaatattcgcgatccgtcgcaggcttactcggctgctgattttcgccgcgatgcgctggcggaaatggccgatatcaccgcggcggggcggatcccactgttagtgggcggtacgatgttgtatttcaaggcattgctggaagggttgtcgccgctaccgtcggcagacccggaagtacgggccagaattgagcaacaggcggcagagcaaggttgggagtcattgcatcgtcaacttcaggagatcgatccggttgcggcagcaaggattcatccaaatgatccacaaaggctttcccgggcactggaagtttttttcatttcgggtaaaactttaacggaactgacgcaaacgtcaggagacgctctaccgtatcaggtgcatcagttcgccatcgccccggcgagccgtgaactgctccatcaacgaattgagcagcgttttcatcagatgttggcttcaggttttgaagcagaagtccgggcgctttttgcccgaggagatttgcatacggatttgccttccattcgttgcgtgggttatcgccagatgtggtcttaccttgaaggcgaaatctcatacgatgaaatggtttatcgaggtgtttgcgccacgagacagttggcgaagcggcagataacctggctgcgtggttgggaaggggttcactggcttgacagtgaaaaaccagaacaggcgcgtgacgaagtattacaggttgttggtgctatcgcaggctgaatgtgtacaattgagacgtatcgtgcgcaattttttcagaatcgaaaggttcaaagtacaaataagcatataaggaaaagagagaatggctaaggggcaatctttacaagatccgttcctgaacgcactgcgtcgggaacgtgttccagtttctatttatttggtgaatggtattaagctgcaaggacaaatcgagtcttttgatcagttcgtgatcctgttgaaaaacacggtcagccagatggtttacaagcacgcgatttctactgttgtcccgtctcgcccggtttctcatcacagtaacaacgccggtggcggtaccagcagtaactatcatcatggtagcagcgcgcagaatacttccgcgcaacaggacagcgaagaaaccgaataaggtttcgggctgtttttttacacggggagccagcgatcctgcgttccccgctgatctatttagagggttatacgcttgtttgaccgttatgatgctggtgagcaggcggtactggtacacatctattttacgcaagacaaagatatggaagacctccaggagtttgaatctctggtctcttccgccggtgtcgaagcattgcaggtgattaccggtagccgtaaagcgccgcacccaaagtattttgtaggtgaaggtaaagcagttgaaattgcggaagccgtaaaagcgacgggagcttcggtcgttctttttgaccatgccctgagcccggcgcaggagcgtaacctggagcgtttgtgcgagtgtcgtgtcatcgaccgcaccggccttattttagatattttcgcccaacgtgcgcgtacccatgagggtaagttgcaggttgagttggcgcagttgcgccatctggctacgcgcctggtgcgtggctggacccaccttgaaagacagaaaggcgggattggtttgcgtggtccgggtgaaacccagctcgaaaccgaccgtcgtttgttgcgtaatcgcatcgtgcagatacagtcgcgcctggaaagagttgaaaagcagcgtgagcaggggcggcaatcgcgtatcaaagccgacgttcctactgtttcgctggtgggatataccaacgccggtaaatctactcttttcaatcgaatcaccgaagcgcgggtctacgcggcagaccagttgtttgccaccctcgacccgacgttgcggcgtattgacgttgcggatgtcggtgaaaccgtgttggcagataccgtagggtttattcgccacctgccgcatgatctggtggcggcatttaaagccacgttacaagagacgcggcaagccacattgctgctgcacgtcattgacgcggcggatgtgcgtgtacaagaaaacatcgaagcggtgaatacggttcttgaagagattgatgctcacgagatcccaaccctgctggtgatgaacaagatcgatatgctggacgatttcgaaccgcgtattgacagagatgaagagaacaaaccgatccgtgtctggctttctgcgcagaccggagcggggataccacagctttttcaggctttgacggagcgtctttccggcgaggtggcgcagcatacattgcgtctgccgccgcaggaagggcgcctgagaagtcgtttttatcagcttcaggcaatagaaaaagagtggatggaggaggacggcagcgtaagtctgcaagttcgtatgccgatcgttgactggcgtcgcctctgtaaacaagaaccggcgttgatcgattacctgatctaacggcgtagcgtctgaagcgtggagtcatatcctctggcgtcgaaagacaacagggatcaccgcataacaaatatggagcacaaacatggcgtggaatcagcccggtaataacggacaagaccgcgacccgtggggaagcagcaaacctggcggcaactctgagggaaatggaaacaaaggcggtcgcgatcaagggccacctgatttagatgatatcttccgcaaactgagcaaaaagctcggtggtctgggcggcggtaaaggcaccggatctggcggtggcagttcatcgcaaggcccgcgcccgcagcttggcggtcgcgtcgttaccatcgcagcggcagcgattgtcattatctgggcggccagtggtttctataccattaaagaagccgaacgcggcgtggtaacacgctttggtaaattcagccatctggttgagccgggtctgaactggaaaccgacgtttattgacgaagtcaaaccggtgaacgtggaagccgtgcgtgaactggcagcttctggtgtgatgctgacgtctgacgagaacgtagtgcgcgttgagatgaacgtgcagtaccgcgtcaccgatccggaaaaatatctgtatagcgtgaccagcccggatgacagtctgcgtcaggctaccgacagcgccctgcgcggggttatcggtaaatacaccatggaccgcattctgacggaaggtcgtaccgtgattcgtagcgatactcagcgcgaactggaagagacgattcgtccgtatgacatgggcatcactctgctggacgtcaacttccaggctgctcgtccgccggaagaagtaaaagcggcgtttgacgatgcgattgccgcgcgtgaaaacgaacagcaatacattcgtgaagcagaagcgtataccaacgaagttcagccgcgtgcgaacggtcaggcgcaacgtatcctcgaagaggcgcgtgcgtacaaggcccagaccatcctggaagctcagggtgaagtggcgcgctttgctaaacttctgccggaatataaagccgcgccggaaattactcgcgagcgtctgtatatcgagacgatggaaaaagtgttgggcaacacccgcaaagtgctggttaacgataaaggtggcaacctgatggttctgccattagaccagatgctgaaaggtggtaacgcccctgcggcgaagagcgataacggtgccagcaatctgctgcgtctgccgccagcctcttcctccacaaccagtggagcaagcaacacgtcgtccaccagtcagggcgatattatggaccaacgccgcgccaacgcgcagcgtaacgactaccagcgtcagggggaataacgatgcgtaagtcagttatcgcgattatcatcatcgtgctggtagtgctttacatgtctgtctttgtcgtcaaagaaggtgagcgcggtattacgctgcgttttggtaaggtactgcgtgacgatgacaacaaacctctggtttatgagccgggtctgcatttcaagataccgttcattgaaacggtgaaaatgctcgacgcacgtattcagaccatggacaaccaggccgaccgctttgtgaccaaagagaagaaagacctgatcgtcgactcttacatcaaatggcgcatcagcgatttcagccgttactatctggcaacgggtggtggcgacatttcgcaagcggaagtgctgttgaaacgtaagttctctgaccgtctgcgttctgaaattggtcgcctggacgtgaaagacatcgtcaccgattctcgtggtcgtctgaccctcgaagtacgtgacgcgctgaactccggttctgcgggtacagaagatgaagttactacccctgcagcagataacgccattgccgaagcggcagagcgcgtaacggctgagacgaagggcaaagttccggtcatcaatccgaacagtatggcggcgctgggtattgaagttgtcgatgtgcgaattaagcagatcaacctgccgaccgaagtgtctgaagcgatctacaaccgtatgcgcgccgagcgtgaagcggtagcgcgtcgtcaccgttcacaaggtcaggaagaagcggaaaaactgcgtgcaactgccgactatgaagtgaccagaacgctggcagaagctgagcgtcagggccgcatcatgcgtggtgaaggcgatgcagaagcagccaaactgtttgctgatgcattcagtaaagatccggacttctacgcattcatccgtagcctgcgtgcttatgagaacagcttctctggcaatcaggacgtgatggtcatgagcccggacagcgatttcttccgctacatgaagacgccgacttccgcaacgcgttaatataacgactgcggtacaggtcaataaagccaccacatcctcagggatgtcggtggttttctttttctataaggataatgaatgaattcgacaatctggctggcgcttgccctggttttggtactggaaggtttagggccgatgttttacccgaaggcatggaagaagatgatctctgcgatgaccaatttgcccgataatattttacgtcgttttggcggtggacttgtggttgcgggcgttgtggtctactacatgttgaggaaaacgattggctgaacaaaaaacagactgatcgaggtcatttttgagtgcaaaaagtgctgtaactctgaaaaagcgatggtagaatccatttttaagcaaacggtgattttgaaaaatgggtaacaacgtcgtcgtactgggcacccaatggggtgacgaaggtaaaggtaagatcgtcgatcttctgactgaacgggctaaatatgttgtacgctaccagggcggtcacaacgcaggccatactctcgtaatcaacggtgaaaaaaccgttctccatcttattccatcaggtattctccgcgagaatgtaaccagcatcatcggtaacggtgttgtgctgtctccggctgcgctgatgaaagagatgaaagaactggaagaccgtggcatccccgttcgtgagcgtctgctgctgtccgaagcatgtccgctgatccttgattatcacgttgcgctggataacgcgcgtgagaaagcgcgtggcgcgaaagcgatcggcaccaccggtcgtggtatcgggcctgcttatgaagataaagtggcacgtcgcggtctgcgtgttggcgaccttttcgacaaagaaaccttcgctgaaaaactgaaagaagtgatggaatatcacaacttccagttggttaactactacaaagctgaagcggttgattaccagaaagttctggatgatacgatggctgttgccgacatcctgacttctatggttgttgacgtttctgatctgctcgaccaggcgcgtcagcgtggcgatttcgtcatgtttgaaggtgcgcagggtacgctgctggatatcgaccacggcacttatccgtacgtaacttcttccaacaccactgctggtggcgtggcgaccggttccggcctgggcccgcgttatgttgattacgttctgggtatcctcaaagcttactccactcgtgtgggtgcaggtccgttcccgaccgaactgtttgatgaaactggcgagttcctctgcaagcagggtaacgaattcggcgcaactacgggtcgtcgtcgtcgtaccggctggctggacaccgttgccgttcgtcgtgcggtacagctgaactctctgtctggcttctgcctgactaaactggacgttctggatggcctgaaagaggttaaactctgcgtggcttaccgtatgccggatggtcgtgaagtgactaccactccgctggcagctgacgactggaaaggtgtagagccgatttacgaaaccatgccgggctggtctgaatccaccttcggcgtgaaagatcgtagcggcctgccgcaggcggcactgaactacatcaagcgcattgaagagctgaccggtgtgccgatcgatatcatctctaccggtccggatcgtactgaaaccatgattctgcgcgacccgttcgacgcgtaattctggtacgcctggcagatattttgcctgccgggctaacagtgtgatacattgctgtgtcggttaagccattacgctatccgacacagtgttaaatcctcgcttttttccttccccgaactgaaataaattagcgacacagcttgtggctggtttatcatcaatataaatgtatttttccccgatttcccttttgaggttgatgtgcagttaacgagtttcactgattacggattacgtgcgctgatctacatggcgtcattgccagaagggcggatgaccagtatttctgaagtgactgacgtctacggcgtctcccgtaatcatatggtcaaaataatcaatcaacttagtcgtgccggctacgtgactgctgttcgtggaaaaaatggcggcattcgcttgggtaaaccggcgagtgcaatacgtattggtgatgtggtgcgcgagctggagcccttatcgctggtgaattgcagcagtgagttttgccacattacacctgcctgtcggttgaaacaggcgctttctaaggccgtgcaaagttttcttacggaactggataactacacgcttgccgatttggttgaagagaatcaaccgctttataaattattgctggtggagtgacgaaaatcttcatcagagatgacaacggaggaaccgagatgtcacaagatcctttccaggaacgcgaagctgaaaaatacgcgaatcccatccctagtcgggaatttatcctcgaacatttaaccaaacgtgaaaaaccggccagccgtgatgagctggcggcagaactgcacattgaaggcgaagagcagcttgaaggcctgcgtcgccgcctgcgcgcgatggagcgcgatggtcaactggtcttcactcgccgtcagtgctatgcgctgccggaacgcctcgacctggtgaaaggtatcgttattggccaccgtgatggctacggctttctgcgagttgaagggcgtaaagatgatttgtatctctccagcgagcagatgaaaacctgcattcatggcgatcaggtgctggctcagccgctgggcgctgaccgtaaaggtcgtcgtgaagcgcgtattgtccgcgtactggtgccaaaaaccagccagattgttggtcgctacttcaccgaagcgggcgtcggctttgtggttcctgacgatagccgtctgagcttcgatatcttaatcccgcccgatcagatcatgggcgcgcggatgggctttgtggtggtggttgaactgactcaacgcccgactcgccgtaccaaagcggtgggtaaaatcgtcgaagtgctgggcgacaatatgggcaccggcatggcggttgatatcgctctgcgtacccatgaaattccgtacatctggccgcaggctgttgagcaacaggttgccgggctgaaagaagaagtgccggaagaagcaaaagtgggccgtgtcgatctgcgcgatttaccgctggtcaccattgatggcgaagacgcccgtgactttgacgatgcagtttactgtgagaaaaaacgcggcggcggctggcgtttatgggtcgcgattgccgacgtcagctactatgtgcgtccgccaacgccgctggacagagaagcgcgtaatcgtggtacgtcggtgtacttcccttcgcaggttatcccgatgctgccagaagtgctctctaacggcctgtgttcgctcaacccgcaggtagaccgcctgtgtatggtgtgcgagatgacggtttcgtcgaaaggccgcctgactggctacaaattctacgaagcggtgatgagctctcacgcgcgtctgacctacaccaaagtctggcatattctgcagggcgatcaggatctgcgcgagcagtacgccccgctggttaagcatctcgaagagttgcataacctctataaagtgctggataaagcccgtgaagaacgcggcgggatctcatttgagagcgaagaagcgaagttcattttcaacgctgaacgccgtattgaacgtatcgaacagactcagcgtaacgacgcccacaagttaattgaagagtgcatgattctggcgaatatctcggcggcgcgtttcgttgagaaagcgaaagaaccggcactgttccgtattcacgacaagccgagcaccgaagcaattacctctttccgttcagtgctggcggagctggggctggaattgccgggcggtaacaagccggaaccgcgtgactacgcggagctgctagagtcggttgccgatcgtcctgacgcagaaatgctgcaaaccatgctgctgcgctcgatgaaacaggcgatttacgatccggaaaaccgtggccacttcggtctggcattgcagtcctatgcgcactttacttcgccgattcgtcgttatcctgacctgacgctgcaccgcgccattaaatatctgctggcgaaagagcaggggcatcagggcaacaccactgaaaccggcggctaccattattcgatggaagagatgctgcaactgggtcagcactgttcgatggcggaacgtcgtgccgatgaagcaacgcgcgatgtgtctgactggctgaagtgtgacttcatgctcgaccaggtaggtaacgtctttaaaggcgtaatttccagcgtcactggctttggcttcttcgtccgtctggacgacttgttcattgatggtctggtccatgtctcttcgctggacaatgactactatcgctttgaccaggtagggcaacgcctgatgggtgaatccagcggccagacttatcgcctgggtgatcgcgtggaagttcgcgtcgaagcggttaatatggacgagcgcaaaatcgactttagcctgatctccagcgaacgcgcaccgcgcaacgtcggtaaaacggcgcgcgagaaagcgaaaaaaggcgatgcaggcaaaaaaggcggcaagcgtcgtcaggtcggcaaaaaggtcaactttgagccagacagcgccttccgcggcgagaaaaaaccgaagccgaaagcagcgaagaaagacgcgagaaaagcgaaaaagccatcggcgaaaacgcagaaaatagccgcagcgaccaaagcgaagcgtgcggcgaagaaaaaagtggcagagtgatcattaccctcttcaaacagaagagggtgaattatccgtaggccgggcaagcgtggcgctcccggcaaaacgtaaacaacgagtacattaatgagcgaaatgatttacggcatccacgcagtgcaggccctgctggagcgcgcccctgaacgttttcaggaagtctttattttaaaaggccgtgaagataaacgtctgttgccgctgattcacgcccttgagtcccagggcgtggttatccagctggcaaaccgccaatatctcgacgagaaaagcgacggtgccgtgcatcagggcattatcgcccgtgtgaagccaggacgtcagtatcaggaaaacgatctgccggatctgatcgcttcgctcgatcaaccgttcctgctgatcctcgacggtgtaaccgatccgcacaacctcggcgcgtgcctgcgcagcgcggacgccgctggcgttcatgcggtgattgtgccgaaagatcgctccgcacagctcaacgccacggcgaaaaaagtggcctgcggcgcggcagaaagcgttccgctgattcgggtgactaacctggcgcgcaccatgcgtatgttgcaggaagagaatatctggatcgtcggtacggcaggtgaggcggatcatacactttatcagagcaaaatgaccggacggctggcactggtgatgggcgcggaaggtgaaggtatgcgtcgcctgacccgtgaacattgcgatgagttgatcagcatcccaatggcaggaagtgtttcttcgctgaacgtttctgtggcgacaggcatttgcttatttgaagcggtacgccagcgtagctaatttctcggaattatgaaaagccatccagatttggatggtctttttttgtctatagctggtaagataattacgtactgcaaatattcattttattaatatttaaacttaatttatatggaataatatatgacatggaatccgttggcgctggcgacggcgctgcaaactgtacctgaacaaaatattgatgtaacaaatagcgaaagcgtattaattattaaaatgaatgattatggcgatttgcaaatcaatattctttttacttcccgccaaatgatcatcgaaacctttatttgtccggtaagtagtatcagcaatccagatgaatttaataccttcttattaagaaatcagaagctgatgccattgtcatcggtagggatctccagcgtgcaacaggaagagtattacattgttttcggtgcattatcgcttaaatcttctcttgaagatatcctgcttgagataacctcgctggtagataacgcattggatctggctgaaattacagaagaatattcacactaattacaaggacgggtatttatgggaattttaaaaagtttatttacgctggggaaatcgtttatctcccaggcggaagagtccattgaagaaacccagggcgtgcgcatgctggaacagcatattcgtgacgctaaagctgaactcgataaagccggaaaatctcgcgttgatctgctggcgcgagtgaaattaagtcacgataagctgaaagatttacgtgagcgcaaagccagtctggaagctcgtgcgctggaagcgttaagcaagaacgtgaatccgtcgttgattaacgaagttgctgaagaaatcgcgcgccttgagaatctcattaccgctgaagagcaagtgttgtcgaatctggaagtctctcgtgatggcgtggaaaaagcagttacagcgacagcgcagcgtatcgctcagtttgagcagcaaatggaagtcgttaaagccactgaagccatgcagcgtgcacaacaggctgtaacgacctctactgttggcgcatcttccagcgtttcgacagcggcagaatccttaaaacgcctgcaaacgcgtcaggccgaacgtcaggctcgcctggatgctgccgcacagttggaaaaagtcgcagacggtcgcgatctcgatgaaaagctggcggaagccggaattggcggtagcaataaaagtagcgcccaggatgtattagcaagactgcaacgccaacagggcgagtaattttttgccagcctcactgcaaggctggcaactattttaaggataaaatatgtctggttttttccagcgtctgtttggcaaggataataagcctgctatcgctcgcggtccgttgggtctgcatctcaatagtggttttacgctcgatacgttagcgtttcgtttgctggaagatgcattgctgattgcgctgccgggtgaggaatataccgtggccgccgtcagttgcatcgatctgggcgggggtagccagattttccgttactacacttcgggcgatgagttcctgcaaatcaataccactggcggcgaagatattgatgacattgatgatatcaagctctttgtctatgaagagagctacggtatcagtaaagagagtcactggcgcgaggcgatcaacgccaaagtgatgggggcaatgaccttaaactggcaggaaaaacgctggcagcgattttttaacagcgaagaaccgggaaatatcgaacccgtctacatgctggaaaaagtagaaaatcaaaaccatgccaaatgggaagtgcataattttagcatgggctaccaacggcaggtgaccggagatacttacgaatatttgctgttaaatggtgaggaatcttttaacgatctcggcgagccggagtggttattttcgcgcgcgctgggtgtcgatatcccgctgacatcacttcatattattggttaattacaaggacgtttacaatgcatatactggattcacttcttgcctttagtgcctatttttttattggcgtggcgatggtgattattttcctgtttatctactccaaaattacaccgcacaacgaatggcagttaatcaaaaacaataacaccgcggcggcactggcgttcagcggaacattgttggggtacgtgatccccttatccagtgcggcaatcaatgcggtgagtattccagactatttcgcatggggcgggattgctctggtgattcaattactcgtttttgctggcgtcaggctttatatgcccgcattaagcgaaaaaattattaatcacaataccgcagcaggaatgtttatgggaaccgccgcgctggctggcggtatttttaacgcagcttgtatgacatggtaatggacgatcatggccagaaaacgcaaatccagaaataacaaaaatatcggacatggggcaatcagtcgcattggtagaccgcataatccttttgagccgcgccgcaatcgctacgcacaaaaatacttaacgttggcactaatgggcggtgccgcttttttcgtattgaaaggttgtggcgatagtggcgatgtcgataacgacggcgacggaacgttttactcgactgtgcaggattgtattgatggcggtaataattcagatatctgtgctcatggctggaacaacgccaaagcggcgttttatgccgatgttccgaagaatatgactcagcagaattgtcagtctaagtatgaaaattgttactacgacaacgttgaacagagttggatcccggttgtttctggatttttgttaagccgggttattcgtaaagatcgcgatgagcagtttgtttataacagcggcggttcctcttttgcttcgcgccccgtctggcgcaacacttccggtgattactcctggcgctccggttctggcaaaaaagagtcttattcttcgggcggctttaccaccaaaaaagcgtcaaccgtttctcgcggcggctatggtcgttcttccagcgcccgtgggcattggggaggctaatcatgctgagacacaacgttcctgtgcggcgggatctggaccggattgccgccgataacggatttgactttcatatcatcgacaatgaaatctattgggatgagagtcgggcttatcgctttactttgcgccagattgaagagcagatcgaaaaaccgactgcggaactgcatcagatgtgcctggaggtggtggatcgtgcggttaaagatgaagagatcctgacgcaactggcgatcccgccgttgtactgggatgtgatcgccgaaagctggcgcgcacgcgatccttcgttgtatggccgtatggattttgcctggtgtggtaatgcaccggttaagttgctggagtacaacgccgatacgccaacttcattgtacgagtcggcttatttccagtggttgtggctggaagatgcccggtgcagcggcattattccgcgcgatgccgatcagtacaatgccattcaggagcgcctgatttcacgctttagcgagctttacagtcgggaaccgttttatttttgctgctgtcaggataccgacgaagacaggagtaccgtgctgtacttgcaggactgcgccgagcaggcagggcaggagtctcggtttatctacattgaagatctcggtttgggcgtcggcggcgtactgaccgatcttgatgataatgtcatccagcgtgcatttaagctgtatccgctggagtggatgatgcgtgacgataacggcccgctgctgcgcaagcgtcgtgagcaatgggtggagccgttatggaaaagtatcttgagtaataaagggctaatgccgctgctttggcgcttcttccctggtcatcctaaccttcttgcatcctggttcgatggtgaaaaaccgcagattgccgctggcgaaagctatgtgcgtaaaccgatttactcgcgcgaaggcggaaacgtcaccattttcgacggtcagaataacgttgttgaccacgctgatggtgattacgccgatgaaccgatgatctaccaggcgtttcaacctctgccgcgatttggcgatagctacacactcatcggtagctggattgtcgatgatgaagcgtgcggaatggggatccgtgaagataacacgttgatcaccaaagacacctcacgtttcgttccgcattacattgctggataagaatgttttagcaatctctttctgtcatgaatccatggcagtgaccatactaatggtgactgccattgatggagggagacacagtgcactggcaaactcacaccgtttttaatcaacctataccattaaataacagcaacttatacctgtctgatggcgcgctttgcgaagcggtaacgcgtgaaggtgctagctgggatagcgattttctcgccagtattggtcagcagttaggaacggctgaatcccttgaactggggcggctggcgaatgtgaatccgcctgaattattgcgctacgatgcgcaaggacgccgtctggacgatgtgcgttttcaccccgcctggcacctgctgatgcaggcgctatgtaccaatcgggtgcacaatcttgcctgggaagaagacgctcgctccggcgcatttgtggcgcgcgcggcgcgttttatgttacatgcgcaggttgaggctgggtcgttatgtccgataacgatgacctttgccgccacgccattgttgttacagatgttacccgcgccgtttcaggactggaccacgccgctgctgagcgatcgctacgattctcacttattgccaggtgggcaaaaacgtggcttgttgatcggcatgggaatgacggaaaagcagggcggttccgatgtcatgagcaacaccacccgcgcagagcgtctggacgatggttcttatcggctggtggggcataaatggtttttctcggtgccgcaaagcgatgcgcatctggtgctggcacagaccgcgggcggtttgtcctgcttttttgtgccgcgctttttgcctgacgggcaacgcaacgcgattcgcctcgagcggctgaaagataagctgggtaatcgctctaacgccagctgcgaagtggagtttcaggatgccattggctggttgttggggcaggaaggggaaggaattcgtctgatcctgaaaatgggtgggatgacgcgttttgattgcgccctgggtagccatgccatgatgcgccgtgcattttcgctggcgatttaccatgcacatcaacgccatgtttttggtaatccattgatccaacagcctcttatgcgtcatgtcttaagtcgcatggcacttcagcttgaagggcaaacggcgttgctgtttcgtcttgcgcgagcgtgggaccggcgcgccgatgccaaagaagctctgtgggcgcgtttatttacgcctgcggcgaaatttgtgatctgcaaacgtggcattccgtttgtggccgaagcgatggaggtgctgggcggcattggttattgcgaggagagcgagctgccgcggctttaccgggagatgccggtaaacagtatttgggaaggttccggcaatattatgtgcctggatgtgctgcgcgttctcaataagcaagcgggcgtatacgacttattgtcggaagcatttgtggaagtgaaagggcaggatcgctattttgatcgcgcggttcgtcgtttacagcagcagctgcgtaagccagctgaagaattggggcgagagattactcatcagctattcctgctgggctgcggtgcgcaaatgttgaaatatgcctctccgccaatggcgcaggcgtggtgtaaggtgatgttagatacgcgcggcggcgtacggttgtcagagcagatccagaatgatttattgctgcgggcgacgggaggagtgtgtttgtaagcgtatacgactgatgcgacgcaggtttcgattaactaaatgaaatattttaaaattgtaggccggacaaggcgctcgcgccgcatccggcattgttcatttgctgtagatgacactcacgcatacagtatcgcctgtacgcgccagttatcaggctgctggtcttcgtacatggtaataatgcggtaccatgacgcaccttgttcatcggcctttaacgccacgatacgttccacgtcctgcggatcccctgaaatattgctaactgagatctgacctatttcattcaggcccgtcacgcagtcagcactggcgaattctgcagactgtgccgtggcgctcgcaggataagtcactaattgcagcgagggtgaggcaagtaattgtttcatcgtcagctccatttttcgtttccccacatgttgcagggcattccatcgcggtaataaacgcccgagcttccagccggtaatttattgtgcacaggtaaacgcatagggacgcaaagcaatgtaaagctgactatgtaagttgtctgatttatttacggtacaaaatggcttgtgaataccactgtcctgtcacgatggtttcgtccaccatgacgacaacgtaataatcagcttttgcagcgacagctttcgctctgatttctgctaatgcgtcatccggagaaccccgaaccatcgtgcttacgctacctattcgctgtaacccttgcgtctggtcgcggcgaatctcttgcggatggtccgttactggcggtgctggctgtggcgtaccttgcagtgcgctacaggcacttaacatcaacaccaataataaactggcaaaccggtaaataacgctattacgtttcctgctaaccatagtgtagtgccttattaatttaactttgggggaatgttcccgaattgttacctggtacgcgattttcgaatgaaaacgtgacgaaagcgtaacccacatctcaacattatgaactaataccgccagcagaaacttgtgctaaggatttcttcatgtcataccagacaaaaaggagagacagatgattgaaatagaatcacgcgagctggcagatattcccgttcttcatgcttatcctgtcgggcaaaaagataccccgttaccgtgtgtgattttttatcacggctttacttcgtccagtctggtgtatagctattttgccgttgcgctggcgcaggctggtttgcgggtgatcatgccggatgcgcccgatcacggtagccgttttagtggcgacgcagcgcggcggttaaatcaattctggcaaatcttgctacaaagtatgcaggaattcactaccttacgtgcggcaatagccgaagaaaactggctgcgtgatgaccgtctggcagtcggtggcgcgtcgatgggcgcgatgacggcactgggaattaccgctcgccaccccacgataaaatgtaccgccagcatgatgggatcgggctattttacatcgctcgcccgttcactgtttccaccgctgatacctgaaacggcagcacagcagaatgaattcaataacattgtcgcgccgctggcagagtgggaagcgacaaaccacctggaacaacttggtgacagacctctactgctgtggcatggccttgacgatgacgtcgtgcctgccgacgaatcactacgtttgcagcaggccttaagcgagacggggcgggataaactgctaacctgttcatggcagccaggcgtgcgtcaccgcattacgcctgaggcgttagatgctgccgtgacatttttcctccagcatctttaaacacgcagaatgctgaccccttgcgcttccagctgttgcaggatttccgggttagcatttttgccggtgatcagcatatcgatttgatcggcacggctaaaaagcattcccgcgcgttcgccaatcttactgctatcaaccagtaccaccagtttccctaccacgctcagcatcttctgctctgccattgccgtcagcatatcggttttatacaacccttctgctgtcagtcctttgccgctggtaaacatccagtgcccggcatagagactgttttcgctgccttgcgggcttaaagtgatggactgacttttgttgtactgtccgcccataatgatcacgctgtcatgctcctgatcgatcaggtaatttgccagcggtagataattagtgatgatttgcactggcttgccacacatttcccgcccaagcagaaacgcggtggagccgcagttgatgactacgctttcgcccggattaaccagctgcgaggccgctttagcaatacgtactttttcatcgtgattctgcgcttgatgcagattcatcggcgtccagcgcgggcgctgttgggtaatagcttctgcgccattgcgcacttttttcagtttgccgctttcgtcaagtttattgatatcgcgtcgtgcagtggcgggcgaaattcccagacgctcaacgactttctcaacggtcacaaagcccaattgtgcgagcatttccaggaggatttgatgtctttgtgcttcagtcatgagctattccgataaaatttgatttttttagatgatatttgaaatagccaggaaatactatgccggatagcgcgagcatctccacgctatccggtacaagcgacagattacaggaacgacttgaacggcagatctggttcaatagtgaagcaatcatcgaaaccacgcggatagtggtactcgaagttgtctttatccagcggccaggtaaatttgccgccgacctgccagataaacggcttgaagccatacttcaggcgatcttttttcatctcccacagcacgcggatctcttgcggatcggcctggaagtttgaccagatatcgtggtggaacgggatcactactttcgcattcagcgcttcgcccatacgcaagatatcagcactggtcattttgtcggtaataccgcgtgggttttcgccgtatgaacctaaagccacgtcgatctgatgctcattaccatgttttgcatagtagttagagtagtgggaatcgccgctgtgatacagggtaccgcctggggttttgaacagatagttcaccgcgcgatcgtccatgccgtccggcagtacgccagctgctttttgatcggcaggcagggtgatcagtgccgtgcggtcgaaagcgtcaagtgcatgaatttcaatgtcttttaccttcactacgtcgcccggtttaacgacgatgcaacgctctttcggtacgccccagccaatccacaaatcaacgcaggttttcggtccaatgaacggtacgtcatcagcacagttctgcatcacggcagcagcgacgttaacgtcgatatgatcgttgtgatcgtgagtcgccagtaccgcgtcgatctggcgaatcgcaaacggatcaagaacaaacggggtggtgcgcaggtttggctgcagttttttcacgccagccatgcgctgcatctggtgaccctgtttcattaacgggttaccgtggctttgtttgccagtaccgcaccaaaaatcaacacaaacgttggcaccgccttctgatttcaaccagatcccggtacagccgagccaccacattgcgaaagtgccaggtgcgacctgctcttgctcaatttcttcattcagccagctaccccactccgggaaagtgctcaggatccaggactcacgggtgatacttttcactttactcatcgccatttaccttcgtgatagttcaattcgaatcaatatgtgattggttttgattaatcctgacactattttttcaggaaggcaatgaccattttttgactttttagcaggagagttattgtggattttgagtgtggaaagattaaattgaatgtgtaatgcaattaactaaatgaatttaaatgaataaatatttcattatgtgaatcccattctgtttatatggaattatttgcgtgcgacgtcacatttaatcataaataatcttgttgtgattacttttgaaaattagagtgagagcacaacattccgggtgtacgaaatacccggttacctcttcttcaggagatcgttatggagatcctctacaacatctttaccgtgttttttaaccaggtcatgaccaatgccccgttgttgctgggtattgtgacctgtctgggttacatcctactgcgcaaaagtgtcagcgttattattaaaggtacgattaaaaccataattggtttcatgttgttgcaggcagggtccggcatcctgaccagcaccttcaaaccggtggtggcgaaaatgtccgaagtctacggcattaacggcgcaatttccgatacttacgcgtcgatgatggcaaccattgaacgcatgggcgatgcctatagctgggtgggttacgcggtgttgttagcgctggcgctgaacatctgttacgtgctgctgcgtcgcattaccggtattcgtaccatcatgctgactggtcacatcatgttccagcaggcggggctgattgccgttacgctgtttatcttcggctactccatgtggacgaccattatctgcaccgcgattctggtttcgctctactggggcattacctccaacatgatgtacaagccgacacaggaagtgaccgacggctgtggtttctccattggtcaccagcaacagtttgcatcatggattgcctataaagttgcgccgttcctcggcaaaaaagaggaaagcgttgaagacctcaaactgccaggctggctgaatattttccacgacaacatcgtctccacggcgattgtcatgactatcttctttggtgccattctgctctcctttggtatcgacaccgtgcaggcgatggcaggcaaagtgaactggacggtgtacatcctgcaaaccggtttctcctttgcggtggcgattttcatcatcactcagggcgtgcgcatgtttgtggcggagctctctgaagcattcaacggtatctcccagcgcctgatcccgggtgcggttctggcgattgactgtgcggctatttatagcttcgcgccgaacgccgtggtctggggttttatgtggggcaccatcgggcaactgattgcggttggcatcctggtcgcctgtggctcttcaatcctgattattccaggctttatcccgatgttcttctccaacgccactatcggcgtgttcgctaaccacttcggcggctggcgcgcggcgctgaagatttgcctggtgatggggatgatcgaaatctttggttgcgtctgggcggtgaaactcaccggtatgagcgcctggatgggcatggcggactggtcgattctggcaccgccgatgatgcagggcttcttctccatcggtatcgcctttatggccgtcatcattgtcattgcactggcttatatgttcttcgctggccgcgcactgcgtgcagaagaagatgcagaaaaacaactggcagaacagtctgcttaataaggagttttgattatgaccgtacgtattctggctgtgtgtggcaacggacaaggcagttccatgatcatgaagatgaaagtggaccagtttttaacccaatcaaacattgaccacacggtaaatagctgcgcggttggcgaatacaaaagcgagttgagcggcgcggatatcatcatcgcttctacgcacattgcgggcgaaatcaccgtgaccggcaacaaatatgtggttggcgtgcgcaacatgctctctcctgctgactttggcccgaaactgctggaagtgatcaaagcgcatttcccgcaggatgtgaagtaaggacgcgccatgaaattacgtgattcgctggcggaaaataaatctatccgcctgcaggccgaagcaaatacctggcaggaagcggtgaaaatcggtgttgacctgctggtagcggcagatgtggtagagccgcgttactaccaggcgattctggatggcgttgaacagtttggtccttatttcgttatcgcaccgggactggcgatgccgcacgggcgtccggaagagggcgttaagaaaaccggtttctctctggtaacgctgaaaaagccgctggagttcaaccacgaagataacgatccggtggatatcctcatcaccatggcggcggtcgatgccaacactcaccaggaagtgggcatcatgcagatcgttaacctgtttgaagatgaagagaatttcgaccgtttacgcgcctgccgtaccgagcaggaagtactggatttaattgaccgcaccaacgcggcagcttaagaaggaattgaagatgtcattaccaatgttgcaagtcgcgctggacaaccagactatggatagcgcctacgaaaccactcgcctgattgccgaagaagtcgacattatcgaagtgggcaccattctgtgcgtgggcgaaggcgtgcgtgcggttcgtgacctgaaagcgctttacccgcacaaaatcgtactggcagacgccaaaattgccgatgcgggcaaaatcctttctcgtatgtgcttcgaagctaacgctgactgggtgaccgtgatttgctgtgcggatatcaacaccgccaaaggtgcgctggacgtggcaaaagagtttaacggcgacgtgcagatcgaactgaccggttactggacctgggaacaggcgcaacagtggcgcgatgcaggcattcagcaggtggtttatcaccgcagccgtgacgcacaggccgcaggcgtggcgtggggcgaagctgacattaccgcgatcaaacgtctttccgatatgggcttcaaagtcaccgttactggtggcctggcgctggaagatctgccgctgttcaaaggcattccgattcatgtgtttatcgctggtcgcagcatccgtgatgccgcttctccggttgaagccgcgcgtcagttcaaacgttccatcgccgaactgtggggctaaggagcggatatgttgtccaaacaaattccgcttggcatctatgaaaaagcgctccccgccggggagtgctggctggaacggctgcaactggcaaaaacgttaggcttcgattttgtcgagatgtcggtagatgaaactgacgatcgcctgtcgcgcctcgactggagccgcgagcagcgtctggcgctggtgaatgcgattgttgaaactggcgtgcgcgtgccgtccatgtgcctttctgctcatcgtcgtttcccgctgggcagcgaagatgacgcggtacgggcgcaggggctggagattatgcgcaaagctatccagttcgcccaggacgtcggcattcgcgtgatccaactggcgggctatgacgtttactatcaggaagccaataacgaaacgcgtcgtcgtttccgtgacggcctgaaagagagcgttgagatggcaagccgcgcgcaggtgacgctggcgatggagatcatggattacccgttgatgaactccatcagtaaggcgttgggttacgcgcactatctcaacaacccatggttccagctctacccggatatcggcaacctgtcggcgtgggacaacgacgtgcagatggaattgcaggccggaatcgggcatatcgtcgcggtgcatgtgaaagacaccaaaccaggcgtcttcaaaaacgtgccgtttggcgaaggcgtagtggattttgaacgttgcttcgaaacgctcaaacagagtggctattgcgggccgtacctgattgagatgtggagcgaaacggcggaagacccggcggcggaagtggcgaaagcgcgtgattgggtgaaagcgcgcatggccaaagctggcatggtggaggcggcataatgcaaaagctgaaacagcaggtatttgaagccaacatggatctgccgcgctacgggctggtgacctttacctggggcaacgtcagcgccatcgaccgcgaacgcgggctggtggtgatcaagcccagcggcgtcgcctacgaaaccatgaaagcagacgatatggtggtggtcgatatgagcggcaaggtagtggaaggggagtatcgcccgtcttctgacaccgcgacgcatcttgaactctaccgtcgttatccgtcgcttggtggtattgtccatacccactccactcatgccaccgcatgggcgcaggcggggctggcgatcccggcgttaggcaccacgcacgccgattacttctttggcgacatcccgtgcacgcgcggattaagcgaagaagaggtgcagggtgagtacgaactgaataccggcaaagtaattatcgaaacgctgggtgacgccgagccgctgcatacgccgggaattgtggtgtatcagcacggaccgttcgcctgggggaaagatgcccacgacgcggtgcataacgcggtggtgatggaagaagtggcgaaaatggcgtggattgcgcgtagtattaacccacaactgaatcacatcgacagcttcctgatgaataaacacttcatgcgtaagcacggtcccaacgcttattacgggcagaagtaaaacacgcgctgcggaaatttccttcttcgggagataactggtctaattccgcagccgtttttcaaaaaaagccccctgcgaagggggcaaagcaaactatggcaatgtttcgttggttatacctggtgctagcgataaatatccgcgctggcgtgcatattgccgttactccccggttcccgcatcagaatcacatggtagtacgttgcgccttgcgcatctgtctcttcatttaatgcctgacgtgcttcactctcagtggcgaagttatgattgatataaatcacgcctaagctttgcacatcgtccatatttctggcctggtggttattaatttcaatggctgcccatgtatttgcacttagcaaaagcacagccagaagggctaaaacgcgactgaacatagatacctcctcgacggctgactttgtgtgctctcctcttgtggtgatcttctgatttaattttaatcaatgataaagaagttgatggtgaccatttctgatgcagttgttcaaaaaaacaccatgacgaagtgtgatgaactccaaatcagcggtttagaggttatttgcgaaaggggagatttatttcggctctgcccttgagttttgcggggtatgtcagtactataacgcgtcatttttcagccgacctttaacacgttccttgcctccccgggattcggctgacccagacaggaggctgaataatccgtaaggagcaattcgatgcgtcattacgaaatcgtttttatggtccatcctgaccagagcgaacaggttccgggcatgatcgagcgctacactgctgccatcactggtgcagaaggcaagatccaccgtctggaagactggggccgccgtcagctggcttacccgatcaacaaactgcacaaagcacactacgttctgatgaacgttgaagctccgcaggaagtgatcgatgagctggaaactaccttccgcttcaacgatgccgttatccgcagcatggttatgcgtaccaagcacgctgttaccgaagcatctccgatggttaaagcgaaagacgagcgccgtgagcgtcgcgatgatttcgcaaacgaaaccgctgatgatgctgaagctggggattctgaagagtaatttctgatgaccaaccgtctggtgttgtccggcaccgtgtgcaggactccccttcgaaaggtcagtccatcaggaattcctcactgccagttcgtgcttgagcatcgttctgtgcaggaggaagccggctttcaccggcaggcgtggtgccaaatgcccgttattgttagcggacacgaaaaccaggccattactcacagtataacggtcggcagtcgcataaccgttcaggggttcatttcatgccataaggcaaagaacggactgagcaaaatggttttgcatgccgagcagattgaattgatagattctggagactagccatatggcacgttatttccgtcgtcgcaagttctgccgtttcaccgcggaaggcgttcaagagatcgactataaagatatcgctacgctgaaaaactacatcaccgaaagcggtaagattgtcccaagccgtatcaccggtacccgtgcaaaataccagcgtcagctggctcgcgctatcaaacgcgctcgctacctgtccctgctgccgtacactgatcgccatcagtaatcggtcacggtccattaatacgactttgagaggataaggtaatgcaagttattctgcttgataaagtagcaaacctgggtagcctgggtgatcaggtaaacgttaaagcgggctatgctcgtaacttcctggtaccgcagggtaaagctgttccagctaccaagaaaaacattgaattcttcgaagcacgtcgcgctgaactggaagctaaactggctgaagttctggcagcagctaatgctcgcgctgagaaaatcaatgcactggaaactgttaccatcgcgtctaaagctggcgacgaaggtaaactgttcggttccatcggtactcgcgacatcgctgacgctgtaactgcagctggcgttgaagtggctaagagcgaagttcgtctgccgaacggcgttctgcgtaccactggcgaacacgaagtgagcttccaggttcacagcgaagtattcgcgaaagtgatcgtaaacgtagtagctgaataattcgttattcaacgagacgtaaaaacgccgaccagtggtcggcgttttgcttttaagcgataaaaaccgcagaaatagacgttccctccataaatctcttgctattccttttataaaaagttcgcagtacccatacctggcccccagcctcgccgctggtagttcgtgtcatgttttttacgcgtaaaacacgacaaaagcatcaatacagcgatcgtctcacttgtatgataataaaaacaatatgttatatatgaatgtgctgttattttattgtttttatatataaaaagataaaatatcatcactttcgtaatcttgaacgctttgcaggtgcgttcaatccaataaatgctaatattatggctatcatagccataaaaagataaaatattatcactatgggtaaaaaaacagcaccgttactcccttatacgaatcagatgcttagtgaatttggtgagcggctgaaacttgctcgtttacgacgcaggcttaccgcaaagcaagttgctgaacgtgctgggatgtcgccaataacattgcgctctctggagtcaggaagtgcaggggtcacgataggggcatatttgtctgtgatgcaggttttgggcctggaaacggatttaaataagcttgcagctgaagacgacttagggcgtcagctccaggattcccgtttgattaaaaaaagagggctttctcgtgcatcaagtaagaatgaagaaggttctcagacagcctcattgcagatgaggcacgagaaagaaggtcatctcaccacggatttaacagcactggcagaaggctcgacgccatctattacaggagaaacatcaacctctcttgcagcactattaaaaccgataaaaaaaccgttaaaaggaaattaattatggcattaatcggagtgtatgcggattgggaaggcctggatggtccggagcggattggttatttacacagtcgccgcactcggacgcgtgagatatttgagtttgagtacgataaaaaggcgcttgcagatccttcacttaatttcattcagttagatcctgaaataatgttgtatgagggagcacagtacccaattcctccaaaggataaatttggtgcatttagtgattcctgcccggatcgttgggggcgtatgctaatgaagcgtcgttttgagagggatattcgagacgggttatgtgataaagactcccacctttatgagtctgattatctactaggtgttcatgatctttatcgggttggggctcttcgatacaaacgtgaagacgctggagagtttcttgataatcgcattgatgttgcagccccaccatttaccgaaatagcgagtctggaaagggctagccgggcaattgaagaagatcctgataataaagagctaatggggcaaaaatggttaagaatgctaatcgctccggggggatcattaggggggggcacgtccgaaaaccagtgttgttgatgaagctgggcatctctacatcgctaaatttcccagtgtaaaagatgagtatgatgttggtggatgggaaatggtcgttaatgcacttgctgttggctgtggactgaatgttgcacctgctcaggcgcataaatttgccagcaattaccattgttttatggttcgtcgttttgaccgcactaatgcgggaaggcgtctgcattttgcttcggctatgacactaaccaggcatcaggatggtgaagatgcctctacaggtgtgagttatctggaattagcagatgttcttatcagacatggagcgcagactaatactgaccttaaggaactctggtccaggattgtttttaatattcttgtttctaataccgatgaccatttacgtaatcatggatatatcttgataccgggaaaaggttggcggctttctgaggcatatgatttgaatcctgttgccaggtctgacggtctaaaactcaatattacagaaaatgataatgcacttgatttggaattagctcgagaagttgcggagtattttcgacttggtttgacagaagcagatgacattattgctaattttagagggattgtcagtcagtggcgaatcattgccgagcgtcttcgattacctggtcgtgagcaagagttaatggcagaggcgttcaggggggcaatttagaatagttattttgatatattcgctaaatcataaatttgcgaagcaatgccagtagatactgaacgttttggaagagacgtttaatttatgagaaaaatagaaacgctacaaagctaaattatagcgtttctatgtaaaataattagcttgtcgctaactgtacttgtggttcttcgtctttaactttgataagcatccacagcgcaatggcgccaataatgtcaaagaaagccagggcaataaagaacggcgcgaagccaataatgtgaacgaatgccccgataaacaggttgaaaatcaactgaccgctccatgcacaggctcctgccatacccacagcggtagctacttcgtcttttttgaataggtcaccgcccagagttgctgcaacagtagaaagacattgatgcgagaatgcgccaatgctaatcagtaatacggcgatgtagggattttcgacaatactcaccagaccaatcgtcatcataatgacggctgcaatagtgaaggtaattcttcgtgagttaattaaactcacgccgcgatcgtggaagaacttcgcgacaaaaccactggctaaacagccgagatcgcccagcaggaaaggtagccagacgaacatggcaatttctttcaggctaaaatgcagcgtttcgacgaagaaaatcggtacccagaagttaatggttccccatgccgggtcagcgagaaaacgcgcgatgccaatcccccagaaattacgttggctgaggatatgcttgattgacgttttttctttcttatctgttttaagatgctgttcttgcccagactcaatatagtggcgctcttcatcagaaaggcgtttagcatcttttggatctttataacaaaagaaccaaaataaagccgcgagtaaagcaaggctacctgagacaataaacgcaaattgccagctatgaaacataatgcaccaggcaatcaacggtggagcaagcatcgcgccgagtgaggtgcccatattgaaaacacctgtcgccacgccacgctcttttgccgggaaccatgttgatgcggtttttacacccgcaggaattgccgatgcttcgctgaaacccatcagggcgcgcataaatgccagacctgaccatgttcctgtcaaggcatgccccattgtcgccaggccccagattgcggcacatatcgcaaaacttaacttcagacccacggtatcaataaagaagcccattatcggttgccccaatgtataggccaactggaatgcactgacaatccatgaatattgttctttggttattccggttgtctccataatcgttggagccgcaatacctaacgccgttctgtccagataattgattacagtgataaagcatacgagggcaatcatatgccatcgataattctttattttattcatttttaaaccttttaattatattaataaaccctggttgttggtatttccatgtaataggcaataaaaatcaggtacagaggaaatattggaaattattgtgtgtaaatgtctccctttaaaaagtctggccagtttttttcaaagtaaataccgttaatacacggttgcatacgtaaagactttacttcggtaataaaagaaccttgcgaatattgaattgttaatttgtgatttttgtcttcagcgagttcagagcgaaaacgccattcttcttttgcgccgcgacgagtttgtggtaggcatttgccttgtggatcaataaccatacgcgccccacggctaccaccaccagcatcaatataatgcgttaattgtgttaataccgcggcagaagtcagcgtcatatgccgccacataaacagctcggcaacttcacccacatgtttgattgccaatccatgtcgttggacaaattcgttcaatagcagggcatcacgagtggcacgtcggactttatcggcatggcaaataaatcccgcatagtcagacattcgtgcctgaattttttctctcacaaccgacaacggcatcccggacccgttatcgtgcgcctgagtaatgatctctcttatagaagccagtgccggagctgccagctgtgcaatatctccatcaatattccgcttttgcgtgcaaccaataaagcgcgccagacgaacagcaaaaacctgcccggcattcaacgccgcgccgccaggtcgggtgacgccgtgtgtgccagcaacttcccccaccgcaaaacaaccgggcagagatgtttgtccccagatatcgacttcaatgccgccattcatgtgctgattattcatggcaaactgcaatggctgcgtgatgagatcgtaaccgtgcatcttatacagcgagatagacagaggattcatttgttgcaggcgttcgatgggcgatggtgccagagcgtcgttattttccagatacgcgcgaacgtcgtcgtccagtcgatctaatgagaacggtaggtcacccggcacaggttctggattacgattgaaatccataaatacctgacgaccatgttgctgctcttgcgctactgccatatctaacaagctggagccaaaatccattacccgcgtggcgtggaacggccactgatagcctttacggaaaatgtttgaagccagctcctgggtggtgcgatagtaatccgcgaggaagttatactcgttgcccccggcatccacggaatagatatatgggatcacctgtacataggtgccggacaaattccacggaaacgtgctgcgcggtgtgcctataccaaactggctttcagtcagattcgttaacgtcagaccttcctccagcgccagccccagcgagccgaaacatttgtgtggatacacactgtcgcgataaagctcgccaggccctcctgttgccagtaccacattgggcgcagtcacaattgccagcccccatgggttatgggcgcgatgaccggtcgcgaggattgcccccgccacacggtcttcaccgttttcgtcacgctgatgcagcagtttaatcactgttgcactggccaacattgggatagcaagacgctgtacttcttccagcagcactttcaccattaaccttgaggtacgcggcccacacgaggttgcacgcccggcttcgtcatggtcggtttgataacgaagaatcgcgccatagcgatcttccggtaattccagaccaagatattgcaacccgccaagagtgtgcagagaacctaccgcttcgacataagcggtgtcgtgatccatcgccccaccgctcgccagtgcctctgccagtttggtgaagttgtcgccgttgcccgcggtagcggcggtaaacagtgtttgtttatcagagccagaacatgccgacgtccccatatataacccggcggtggcgattaacacattttgctggcggcgtttaagttccacagctgcacgtagccctgctgcaccactgccgactaccagggcatctgttttccagagtgggtaatcaacaccgtctaccgtgacaacccatgcgggttctgcctgtgcaaaaccctttgggaaagtaacgtgtgtcagtgcatcaaggatggcctcatcaagctggctcatgcatcctccatcggcgtaaacaggctactttccatcaggcgtgggtgcttgataattggacggaaggccatgaatggcagaatgtcgcgctcaatctctacgccaggggcgatctcaattaattcaacgccttctgccgttaactggaataccgcacgttcggtgatatacagcacttcctgaccgctttgctgtgcgtatgcggcgctaaaggtgattttttccaccagggtaaccagtttagggatttgacctgactgggcgatatgcaagccatctggcgttacatcaatcttgctgcctttggcgtcgaacgtaccgcaaaacaccactttacgggcgttttgtgcaatttcgagaaatccgccggggccaatgagattgccattaagatgggagacgttgacgttaccgtattgatccatctctcccatgccgaggaaggtgatatcgatgccgccgccactgtagaattcaaattgatcgagtgatggaataatggcatcggcgttacgggcgcagccgaacagagcatcatccagcatcatgccgttatgcacaccctgttctacactcagccacaaactttgataaggcacgccttcgcgcagcgcaaccccaggaataccgcccggaataccaaagccaaagttggttgaagcgcctgccaccagttcccgcgctgcccgacgggcaatcaggcgacgcaccggatgactaaccagttcaatagcgtcgttagaacttagacggcgatgttgaccgctgatggtcaggtcgtaaccgccaagataggtttgcggttgttcgcggtgctcaacgatgccatcgaccagaattcctggtagtttgacccgacgtggttcaatggtacctgcttccagcacatcgcggacctgtacgaacactttgccgccgctgttgtgtgctgccagcgccatcgaatagctatccatatcaatcgcctcttcttcgaggctgacgttgccacgcggatcggcataggtgccgcgcaaaatcgcgtagtccactttgaaagggcgataacgaagtttggtctcaccgtcgatttcaatcagttctaccaggtcgtcggtagtgcattcattcgacttaccgccaccattgcgtggatcaacaaacgatcccagcccaacgtgggtaaaaagccccggacgtccggcaccgatctcccgcagcagtgcctgaattacgccaccagggaaacagtaggcttcaatagcattgcttttcaccagttcctgcatcttgggcgaccaggtaaaatgtccggcaataatgcgtttgagcatttcggcgtgagcaaaacggttagtgcctttgctatcgcgatcgccaatacccagcgagtggattaatgtcagatcgcgcgggtgtccggtttgcagaaagcgcgcttcaatggcggccagaatatggtcagcttccaccatgccgccgccgttaccgctaatggcaatggttgcgccgtcctgaatttgcgccgccagtgtctcggcggttgataacttacgcatacaatttccttattgattgtggaagctcacgccggctttttcggcaaatgcgtgcgtcgcctgttggcaatcctgagtggcggacattaatccagccagtaactggtgggagtaatcggcgtgtttattttccagcgccagaatcagttgcttaatatgtgccagtgccaccggaccacatttttccagctgcgctaactggttcgccatccagctttccacctgttctttttctaccacttcatcaattaaattcgccgcctgagcttcctgcgccgtcaggcgtttacccagcatcagcatctggcgaccgaccaccgggccaacctgattaagcacgcgttcaatgcccatccagccaggcaccatgccgagcatcacttcaggattagagaattttgcgtgggggcgagcgatacgaatatcacagcacaaggcaagttcaataccgccaccgatggtatgaccgttgagattcgcaacggttaattggggtaagttgcgcaggcgattaaaaacgtcattaccgcgtttaatccattttctgcccatatctaatggcgaataggccgaccacgatttaatatcgccgcccgcacaaaagaatttatcgccggttgccgttaattcgactaagcgtaatgccgtgtcattttcaatttcatttaaataatggtcgagagattcgatcatttcttcattaatagcatgacatttatcttcacggttcaatgtcaggcggcaagaagccgccgctctgctgaacagaacgggttggtcactcatgattattccttaacaataatgtgcgatgcgatcgacgctaatatccagcgtgctgttaatatctttctgccaccagtacggtgagaatatttccagttcaatagcgccattaaatccggcgttttcaaccagccgacgaattgacggaatattgatgacaccatctcccggcattccacggtcattgaccagatcggtggtcggcactaaccagtcggaaacatgaaacgcgaggatgcgttttccggcacgcaggatctgactggcgagatccgggtcccaccagacatggtagacatctaccgccacgccgaggccaaattcgccatcgggatcgagttcatcacaccagtccagcgcctgacgtaacgtgcacaaacaggaacgatcggctgcggtcatcgggtgtagcggctccagcgcaatcggcacgccgacctctttcgaatgtggcagtaactggcgaatcccttgtttcacttgttcccgcgcttcatacagatcttttgttcccattggcagaccgccaaccacctgcatataacaggcggcgttcagtacagcggcgtcgtccagcgcccggcggttatcgtcaatcgccagtttgcgctccgccagcgtcggtgcggtgtagtaggtgctacggcacaaaccggaaacgtttatgttactggcagcaagctggcgggcgatttgctggagatcttcaccctgcaactccctgcgccagggggcaatggcgccaataccgcgtgcggcgcaggcatcaataatggcgggcagcggcgttttatagcccagtgtcgcggtattgatactgaataaatccgggcgttgtaacagatctctcatgattcagcctcagaagcgcggcatacttaagccgccgtcgatggcgaccgcctgaccacaggtgtaaatcagtttaccttccgccatcgcgcggacagtggaagcaatatcagccggataaccccaacgtccccacggcaccagacctttggcaatcagttcgtcgtaataggccgttgccggaatagtcatatcggttttgatgagaccaggacgcacttcataaacgccaatttgttcattacaaaggcgagcagcaaacagacgagcagcggcagagacggcagttttggcaatggtatattcgccgcgattcatcgccagcatgatggcgttgatggaactgacgaaaataatcgagcggtgcggcagttctgcttccggtttcggctgtgccagtaagcgcttactgaatgcctgagcgaggaagaacggtgcgcgggtgttaatggcaatattttggtcgaagctgtctggttcgaggtcgagaaggtcaccgcgttttttcactgaaatgcctgcgttgttgagcaggcagtccagacgtccccactggttttgcgctgcgtcgagcatctcttcatgcagggagagatcgcccacatcagcagggaagcaaatcacttccacgccttccgccagacattcttgttgtgtggcatgtaatttttctacgctatccgcatccggacgatcattaatcagcagattaaatccgccacgcgcaagctccagcgcacagccctttccaataccacgtgcggctccggtaatcacggcaacaggacgagtggatttcatacaatagctctctttttttgaattttgtttccttagtgatgattagcttgcgactggaggataaaaagatcaaccatctagttggttgatatgcgatggcgatcacaggacatttgataacctgatgaaagtacaagtttttgcccttttttctgaagctgaaatcaaatcaggttatgatagtcaccacgaagaggtcgtggggaagcgttatgtatcttgataccagcaacgtacagagcctgaaagaaaagctgctgttatgcgcggttaatgaatttgccgaatatggttacgaaggggccagagtcgataatatcgtcaaggccgcggggtgcagtaaacaaacggtttatcaccactttggtaataaagaaaatttatttatcgaagtactggaatatacctggaacgatattcgacaaaaagaaaaggcccttgatttctcagatcttccgccacagaaagccattgagaaaataatcgattttacatgggattattatatttctaatccctggtttttaaaaattgtgcatagtgaaaatcaaagtaagggtgtgcattatgcaaaatcacagcgtcttttagaaattaaccatgcgcacttgcagttaatggaatccttattggatgaagggaagaaacaaaatatttttaagccagatatcgacccattgcaggtgaatattaatattgctgcgcttgggggatattatttgatcaaccagcatacgcttggcctggtttatcacatcagtatggtttcaccccaggcactggaagccagacgtaaggtcatcaaagagacaatccttagctggcttttggttgacccttcatctaccgcgcgcgaataaaactgccatccggctggcgggtaaacaggacctgttgattattccccgtatcaatggttaagcccgtcaccacgccgctggcgttctggcggattttcaccatctgcccgttttgcaaattactcagtggcttatccgcgccttctacctgcgccatggcatagacatcggtagcgggcagtccgtggtcgcggaacagctgcgccatcgttttaccgggttcgacacgataggagcgccattgattatcaattccgctatctggctggaatggttgcgtatgggtggtttgcggctgctcttctggttggccttcctgtattggttctggagcgaccggagccacctgatcaggatcattttgtggcgtgactaattgcgcccgcagctgttcttctgtcggtggttgtgattgcgactgaatatctaactgcgcttcacgcgtcaccaccggcgcgttgggcgtatcatcagatggaagcagaaatccgactaccaatacaatggcggcaataatgatcccccgacgatgcatcggcggcagcgggtccatgaagcgaaaattgtccggcgcgtgccagactttctccagggttggttttagttcaaagcgcccgggcatggtttcctcctgctccgcgtcttgttcctcaatcatagcctatgaataagctaacgctatgatgtccgtggtaaacccgcctttattatattcatacgggatattgctattgtttctttttccccgggatttgtcatcattcccgcgacaaagttttacccaaagaagtgtggctgatatgctgcccgctactttataccctaagaaaggaaatacgatgaccaccccaacttttgacaccatcgaagcgcaagcaagctacggcattggtttgcaggtagggcaacaactgagtgaatctggcctggaagggctgctgccagaagcactggttgcaggcattgccgatgcgctggaaggcaaacatccggctgttccggttgatgtggtgcaccgcgcgctgcgtgaaatccacgaacgcgccgatgccgttcgtcgtcagcgtttccagacgatggctgctgaaggtgtgaaatacctggaagaaaacgccaaaaaagaaggtgtaaatagcaccgaatctggcctgcaattccgcgtgatcaaccagggcgaaggcgcaattccggcacgtaccgaccgcgttcgtgttcattacaccggaaaactgatcgacggcaccgtgtttgacagctccgttgctcgcggcgagccagctgaattcccggttaacggcgtgatccctggctggattgaagcactgactctgatgccagtaggttctaaatgggaactgactatcccgcaggaactggcatatggcgagcgtggcgcaggcgcgtccatccctccgttcagcaccctggtgtttgaagtcgaactgctggaaatcctctaagcagcgcattctgttcccctcgaaccagaggggagcaggcattcagcaataaacccttcagtttgccaaacggcgctattttatgttgcaaagaccctgtaagcgtgtatttttgtgagctgtttcgcgttatcaccgtgatatgacactcactttaaacataaaattaacattagatctaaatcttagtattcatcccgcgtattgttacctaatatcgatgagtcccgatacagattcgtcgtatcatagactgactaaaggccgtagagcctgaacaacacagacaggtacaggaagaaaaaaaacatggtagatcaggtaaaagtcgttgccgatgatcaggctccggctgaacagtcgctacggcgcaatctcacaaaccgacatattcagcttattgccattggcggtgccattggtacagggctgtttatggggtccggcaaaacgattagccttgccgggccgtcgatcattttcgtttatatgatcatcggttttatgctctttttcgtgatgcgggcaatgggggaattgctgctttcgaatctggaatacaaatcttttagtgacttcgcttccgatttactcgggccgtgggcaggatatttcaccggctggacttactggttctgctgggttgtaaccggtatggcagacgtggttgccattaccgcctatgcgcaattctggttccctgggctttctgactgggttgcttcgttatccgtgatcattctgttactggttctaaacctcgccacggtaaaaatgttcggtgagatggagttctggtttgcgatgatcaaaatcgtcgccatcgtgtcgctgattgttgtcggcctggtcatggtggcgatgcactttcagtcaccgaccggtgtggaagcatcatttgcacatttgtggaatgacggcggctggttcccgaaaggcttaagcggcttctttgccggattccagatagcggttttcgctttcgtggggattgagctggtaggtacaacagctgcggaaaccaaagatccggagaaatcactgccacgcgcgattaactccattccgatccgtatcattatgttctacgtcttctcgctgattgtgattatgtccgtgacgccgtggagttcggtagtcccggagaaaagcccgttcgttgaactgtttgtgttggtaggtttgcctgcggctgccagcgtgatcaactttgtggtgctgacctctgcggcgtcttccgctaacagcggtgtcttctctaccagccgtatgctgtttggcctggcccaggaaggtgtggcaccgaaagcgttcgctaaactctctaagcgcgcagtacccgcgaaagggctgaccttctcttgtatctgtctgctcggcggcgtggtgatgttgtatgtgaatcccagcgtgattggcgcgttcacgatgattacaaccgtttccgcgattctgtttatgtttgtctggacgattatcctttgctcgtacctggtgtatcgcaaacagcgtcctcatctgcatgagaagtcgatctacaagatgccactcggcaagctgatgtgctgggtatgtatggcgttctttgtgtttgttctggtgttgttgacactggaagatgacacccgccaggcgctgctggttaccccgctgtggtttatcgcgctggggctgggctggctgtttattggtaagaaacgggctgctgaactgcggaaataatcgcattatcatgctggatggcgcaatgccatccagcttttagatcactcacccgccagcgcgcgcgggaatagtacattgttttccagactgatgtgctccatcaggtcatcaatcagttcattaatgccgttatacatcgctttccaggtggtgcaggcttccggcggcggtgtgacgttattggtggtgtgtttgatcacttccagcagttcgcccgcttcatcgtgctcgctttccattacgctgattggccccattgcctggctgcccatgccttgtttaatcatcgggaagagaatttgctcttctttcatcatgtggctggaaagctcttcatgcagcatagtcaggtattttgtcagcccttttggcacacttggtttgtcggcgtgaacgcgctcgactttagtcgcttgcaggatcagctccggcagctgctcgcgatggcgatcgtgatagcgcacaataatgtggtcgatgatttccgccagcggggcgctacgccagtctttctcaatcggttgttcagcaagctttgccagttcggcttcaatgacgtcaacatccagttctttacgtgccgccgcgcgcgccagcgtctgcttaccgccacagcagtaatccatatcatatttacgaaacagagccgaagcgcgaggaatagagagcgccagttcacctaaaggttggtcgcgataagccatagctgatacctcattcttaataagataagatgcattttaaatgcatctttaaggcaaaagctataacccttacgtagcagaggcttatttaactcactgccagcgtgtcaactttctgagacagattcagttaaaggtttttctggttttgctctgaccgcgatgaccacgccaatcactaacagcgcgataccgctcagcgtcattagcggcggcatttgctggcggagtaaaaaggtgtacagcaaacctgccagcgtttcgaaaacaatcagcggcccgagaatcactgtcggtaatcgctggctggcgacgttccagcagagtgcgccaacccatgagcaaagcacggctatcgcaaccatcagactaataaacaccagcggacgggggccaaagggtaaggagaagtccggcgtttgcatattcagccagtaacaggcgacgagatagccgatgagagaaaccggcagcgtgaccagcgcctgcgccgtcgcccacatcatcggatgtttgtcgggattttcccgcagccagcgggcgttgcgcagggcataccatgcccagcagaccacggaaactaacgctagcacgatgcctgaggtataacgtgcccagtcaaaatcggggagtccgtggtttaactcagcaatattcacacacgccaggccgatgccaatacaaaccagtgccggggcgagttttccccatgcgagtttgccgtcgcgctggctataaagcagattggcaaaaacgggaatcaccaccggcagggtgccgataatcatcgtggaaacaggcgcgccagtacgttgaatggcacttgcaaggcagaagtaatagataaggttgcccatcatggtgagcatcaaggcggtaagccagtcgcgacgcgccaactgacgcagacgcacgcgtcccagccaggcaatgggcagcgcaattaaccctaacgccagataacgccccatcgactgcaacatcgccgggtattccggtacgatcaacggcccgacaaaaataagcccccacatcaaccctgctaacagggcgtacagcacgccgctaatcattactggcatccattggtctgtcagaagaaagttcaggaagcagacatgattgctcccggcatcccgtcattatcagagaggatgcgggaggatgccactttaattaactagttattaacattaaaaagatggcttacgctttcggctaacgttgtcgttgggcggccaatcaatttgctaagcgttttgctgtcatcaaacagaccgcctttcgatgcgccaacgtcagaatccgccagcatatccgccagtccatcaggcagaccgacgcttttcagcgccgcggcgaaatcagcttcgctcaggttttgataggtaatcggtttgccgctctgtttggtgagttctgccgctaactgtgtcagcgtccaggcactatcgcccgccagttcgtaaaccttgccttcgtgaccggcttcgctaatcacgcgtgccgcagctaccgcataatcagcccgcgttgctgaggcaattttgccatcgcccgcggcaccgataaatacgccgtgttccagtgctgccggggcgctggcgaggtagttttcactgtaccagccgttgcgcagcagggtgtaaacgatgccagaatcagccagcattttctccgtctcgatgtgctcatcggcgaggccgagcggggaggaatcggcatgtagcaggctggtataagcgataaatttcacgtcggccgcctttgcggcattaataacattacgatgctgcggggcacgttgacccacttcgctggaagagatcagcagtagtttttccactccctgaagcgcagatgtcagtgctgcttcatcgccgtagtcagcctgacgcacggtaatgccttgtgctgtcagtgcctgtgcttttgccggattacgaacgatagccactatttggctggcaggaaccgttttcatcaaggattcaataacatagtgaccaagttggccagtggcaccagtaatagcgatcatgggaagtctccatcgttttgtcttgtgtttaaatacgctaacacctaaacttacttttagtaagtacgtacaaaaaggtaagtatgaaatgagtcaggttagcctgtcgcaacaactgaaagagggaaatctctttgcggaacagtgcccgtcgcgcgaggttttgaaacacgtcaccagccgttggggggtgttgattctggtggcgctacgcgaaggtactcatcgctttagcgacctgcggcgcaaaatgggcggggtgagtgaaaagatgcttgcgcagtcgttacaggcattagaacaggatggttttcttaaccgtatcgcgtatccggtggtgccgccgcatgtggaatatagcctcacgccgctgggcgagcaggtgagcgaaaaggttgctgcactggcggactggattgagttgaatttgcccgaggtgttagcggtgcgggatgaacgtgcggcataactgccggatgcgctgcgcttatccggactacggttcatggcttgtagggcggataagatgcgtcagcatcgcatccgccaataaatgccggatgcggttgatgatttgtaggccgaaaaagaagtgttttacttactcagatccacctgataaatcgcaaacccgatatcatcggtcgcgactttattcatcggatactgccctttctctttaataaacactgcggctttatctgacggagaggtttcgaaacggatatccagtttcttatcgccagctattggtgctaaacgccagttgttatctgccgccgggtgaatttcccccgcacgtttcgactcatcagcaatccacgctgccagcaccgagcggttctcatccggtgaagcaaaagcgatatggctgtcgcccgtaccggcaaatttgccgccgtaagcgcgatagttattggtggcaacgaggaacatggcgttcggatcaatcggcttgccgttaaaggtcaggttcttaatcctttccgcattggcattaatcatctggcactcgccgtcataacgggcgggctgggtaacatcaatctgataattcacaccatcaataacatcaaagttataggtgcggaaaccatcccagttgatgagtgactgtggtttcgtgctgttaggatcaatctggttaaactgtccggcggagcactccagccactctttcacctctttaccgctggctttcaccacaatcagcgtattggggtagagataaagatcggcggcattacggaaggtcaactggcctttttccacctccacatagcttgcggggtcatttttgcgaccaccaactttaaacggtgcggcagctgaaagcactggcagttttgccagatccggatcgccctgaatgtaatgctcgacatacgctttttgcgcgttgttcaccacctgcacggtcggatcgtcctgcacaagcgccagatagctatacatattgtcggcagatttaccgattggcttgctgacgaactggcgtgtggcatcgtgatcggctttgagtgtttctaccagcttgctgtcttccgccgcgagggattttttattcgcgatgtcgtaaatcggccgtgcttccgctttcgcctgcgtcacctgccatttaccgctgtcattactgagttgtaagtcgaccacaccaagatgatcgccccacatgcctggcattaccgccggaacaccattcagcgtgcctttcgcgatatcagccccttcgatatcagcaaaatctttacctgggaaaacggcgtgagcatggccaaacataatggcgttaacgcccggaatttcactgaggtaataaactgagttttccgccatcactttatacggatcggcagacagcccggaatgcgccagaacgacaacgacatcggcacctttctcgcgcatttcaggcacgtatttgcgcacggtttcggtaatatcattcaccgtcactttcccggataaattagctttatcccagcccatgatttgtggcgggacgacgccaatataaccaatcttcagcgtctgtttttttccgtctttatcgaccacttcggtgtctttaattaaatacggtgtaaacattggctgtttggttctggcgtcaatgacgttggcatttacataagggaatttcgctcccgccagcgcatttttcagataatccagaccgtagttaaactcgtggttgccaagcgtgccgacggtatagtccagcgtatttaatgccttatagaccgggtgaatatcacctgcttttaatcctttcgccgacatgtaatctgccagcggactcccctgaatcaaatcgccgttatcgaccagtacgctgtttttcacttcattgcgggcatcgttaatcaggcttgccgtacgtaccagtccgaatttttccgtggcggtgtctttgtaataatcgaaatccatcatgttgctatgcagatcagtggtttccatgatacgcagatcgaccgtcgctgcattcacactggcggcaatcagcgtggccaggagcgttgcgctaaacttaatcatcagggacatccttttatcatcgggaatacgaaagaaaagggagaataaacgtcttacttatagaacagtgaagaatgccacaattttacgctttgaaaatgatgacactatcacagttggcgcattcattaacgatagggtataagtaaaacaataagttaacaccgctcacagagacgaggtggagaaatgttagatcaagtatgccagcttgcacggaatgcaggcgatgccattatgcaggtctacgacgggacgaaaccgatggacgtcgtcagcaaagcggacaattctccggtaacggcagcggatattgccgctcacaccgttatcatggacggtttacgtacgctgacaccggatattccggtcctttctgaagaagatcctcccggttgggaagtccgtcagcactggcagcgttactggctggtagacccgctggatggtactaaagagtttattaaacgtaatggcgaattcaccgttaacattgcgctcatcgaccacggtaaaccgattttaggtgtggtgtatgcgccggtaatgaacgtaatgtacagcgcggcagaaggcaaagcctggaaagaagagtgcggtgtgcgcaagcagattcaggtccgcgatgcgcgcccgccgctggtggtgatcagccgttcccatgcagatgcggagctgaaagagtatctgcaacagcttggcgaacatcagaccacgtccatcggctcttcgctgaaattctgcctggtggcggaaggacaggcgcagctgtacccgcgtttcgggccaacgaatatttgggataccgccgctggtcatgctgtggctgcagctgccggagcgcacgttcacgactggcagggtaaaccgctggattacactccgcgcgagtcgttcctgaatccggggttcagagtgtctatttattaattaatttatgcagcaggtccatcacttgctgcacctcttcctgagtaagtgccccgtctttggcccattgcacgcgaccgtctttatccagcaccactacagcggaacttttttcatccagctgccaggcaccgcgtgcgacgccattgctatcaacaataaactgcgaccagggataaagctttttattactctccagactgctgcgcacaaacatccctgaacccggaatcgcgtcgtcggtgttaacaatggtggtggtctggtaacgatcgtgcggtaacttcgctgatttaatcgcttcaatcagcgtcgcgtttttctcttttgcagaggtgcgaccagcaatatgttgcagtactcgcacttttcccactaactgcgcgctgttccaggttttgtagctaaactgatctttatcaagcaccaactcgccacgatcggtgatgccaatcggcggcactcgctgaccggtttcgaactgatgtgcggaagccatcatcggcaacagcaggcaggtgagtgccagaatcttgcgtagggtcatggtgtttccttcttatgatatgcaggtgatccgaccacttgggtctgagttttaatcatatgtgctatttatcgaatttcccgcaagtgtgatgccagtttgcggtcaagcgcacaaatcatatgaaaaatgaatgcttatactgaagaccgcgcttcggtaaaaagataattctgaataattgtaacctttaggtaaaaaaagttatacgcggtggaaacattgcccggatagtctatagtcactaggcattaaaatttgcgcctcataatagttgggccgattgtggcaccgcaaaggcgtaatactcagcaggagataacaatgaaaattttccaacggtacaacccacttcaggtggcgaagtacgtaaagatcctgttccgtggacggttatacatcaaggacgttggcgcttttgaatttgataagggtaagattcttatcccaaaagtgaaggataagctgcatttgtcagtgatgtccgaagttaaccgtcaggttatgcgtctgcaaacagagatggcttaaccaaagtgctatgcagtaaaaagtgctatgcagtaataagacggctcctgattcaggagccgttgatgtttctggggttatgcgacgctttcttctttatctttagcgtcaggcagttttggcgaaagggcggtggctttgctgtcgattcgggtcaccagcagctggtcgatgcggtagttatcgatatccaccacttcaaatttgtagccggcgaatttcaccgaatcggtgcgtttcgggatcttacgcagcataaacatcataaagccgccgatggtttcgtagttgcccgactgcgggaactcgtcaatatccagcacgcgcatgacgtcgtcaataggcgtgccgccgtctatcagccatgagttctcatcacgggcgacaatttgctcttccagcccctggccgaccagatcgcccatcagcgtggtcatcacgtcgttgagggtgatgatccccactaccagcgcgtactcgttcatgatcaccgcgaagtcttcacctgcggttttaaaactttccaacgcctctgaaagggttaacgtatccggcacaatcagcgtgttgcgaatttgtacgccgctgttcagtgccaggctttggttagccagcacgcggttcagcaggtctttagaatcgacatagccgatgatgtggtcaatatcttcattacagacgagaaacttagagtgcggatgttccgccactttattcttcagactttgctcatcttcgtggagatcaaaccaaatcacgttttcacgcggtgtcattgaagacggaacggtacgggattccagctcaaagacgttttcaatcagctcgtgttcctgtttacgtaacacgcccgccagcgcaccggcttccactaccgcgtagatatcatcagaagtgatgtcatctttacgtaccattggcagtttgaaaatacggaagattatgttcgccagtccgttgaagaaccacaccagcggggtgcaaacgtacaggcagaagcgcatcgggttgatgatacgcaaagccacagcttctggcgcaatcataccgatgcgtttcggggttaaatccgcaaacaggataaacatgccagtcactaacgagaaagagagaataaagctcagttgctcagagagttctgccgacatatagcgggagaacaggctgtgaaaagctggagaaaatgccgcatcaccgacgataccgccgagaatcgccactgcgttcagaccgatctggaccacggtaaagaacatgccgggattttcctgcatattcagaacgcgttgggcatttatattgccttcatcagccagcagtttaagtttgattttgcgtgaggcggcaagcgagatctcggacatcgagaagaacgcacttacagcgatcaaacagagtatgactaaaatactgtttaacatatcttatccgacctttcaggccagatcctcggaaggggaagttgattaatttgtgtgaaatacacattgaaagccgattcgaagaaagtgaaccggcattttcagtggctagtatagcgtaaggtactgtaaagccgccagagggttaaaattcagacagctgaaaaatgaaaaactgcctgatgcgctatgccgaacaggcctacgcagtccccgcaatatattgaatttggacgattttgtaggcctggcaaggcgtttacgccgtatccggcataaacaaaatgcactttatcaacaatctacatttgtacccgtaacgctatgcttccggcggcagacagacgccaattccgccaattccacagtaaccatacgggtttttatgcagatattgctggtggtcatcttcggcataataaaacggtgtggcgttagcgatttccgtggtgatgcgacgatcgtcatcggcggcaagcatcgccgcctgaaaacgttccagactggcgcgagcggcggcatcctgttctggggtcagcggataaatcgctgaacgatactgcgtgccgtggtcattgccctgacgcattccctgggcgggatcgtgattctcccaaaatacttgtagcaactgctcatagctgatgacggatggatcgtaaacaatgcgcaccgcttcggcatggccagtatcgccggagcacacttcccgataagtcggatttggcgtatagccgccggtatagactgcggcggtgctgtaaacgccgggtaactgccagaacagacgctccacaccccagaaacaacccatcgcaaaaatggcaatctccattccgtcaggtacattggtcattgagtgaccgttgaccgcatgcagtgtggctacgggcatcggggtgttacgtccaggcagggcatcggcgggggaaaccagatgctttttatcaaataaactcatggtgtcgctctcccgaaaatcggtcattggggttaaggttgtaacaagaggcgtatttgcacacaataaccaccgtgaataggtctaaagtaaaacataagaaatattttgggtttagtctgctttttaatccatattactggatttttgttaagccgtttaacggcgttccaggggcaggaaaaaaggatattcaggagaaaatgtgcgctatatccaacagttatgctgtgtaagcttactctgcttaagcggatctgccgtcgccgcgaacgtccgtctacaggtcgaggggttatcgggacagctggaaaagaacgttcgcgcgcagctttctacgattgaaagtgatgaagtgacgccagaccgtcgctttcgcgcacgcgtcgatgatgccatccgcgaaggtctgaaagcgctgggctattaccagccgaccattgaatttgatctccgtccaccgccaaagaaagggcggcaggtattgatcgccaaagtcacgccaggcgtgccggtgttaattggcggcaccgatgtggtattgcgcggcggcgcgcggaccgataaagactatttgaaattgctcgatactcgcccggctattggtacggtactgaaccagggcgattatgaaaatttcaaaaagtccttaaccagcattgcgttgcgtaaaggttatttcgatagcgaatttaccaaagcgcagctgggcattgcgctcggcctgcataaagccttctgggatattgattataacagtggcgaacgttaccgctttgggcatgtgacctttgaaggatcacaaatccgcgatgaatacctgcaaaatctggtgccgtttaaagagggcgatgagtacgaatcgaaagatctggcagaactgaaccgtcgactttctgctaccggctggtttaactcggtggtggtggctccacaatttgataaagcgcgcgaaacgaaagtattaccattgacgggcgtggtttcgccgcgaacagaaaacaccatcgaaactggcgtcggttactctacggacgtgggaccgcgcgtgaaagcgacgtggaaaaagccgtggatgaactcttacggtcacagtttgaccaccagtaccagtatttccgcgccggaacagatcctcgacttcagctataaaatgccgctgctgaagaatccgctggaacaatattatttggtgcagggcggttttaagcgcactgacctgaacgataccgagtctgactccactacgctggtggcttctcgctactgggatctctccagcggctggcagcgtgccattaacctgcgctggagtttcgaccactttacccagggtgaaattaccaacaccacgatgctgttttatcctggggtgatgattagccgcacgcgttctcgtggtggcctgatgccaacctggggcgactcgcaacgctactctatcgactactccaacacggcctggggctcggatgttgatttctccgttttccaggcgcagaacgtctggatccgcacactgtacgatcgccatcgttttgtgacacgcggcacgctgggctggattgaaacgggtgatttcgacaaagtaccgccggatctgcgtttcttcgccggtggcgatcgcagtattcgcggctacaaatacaaatctatcgctccgaaatacgccaacggtgacctgaaaggggcctcgaagctgataaccggatcgctggaataccagtacaacgtgaccggaaaatggtggggcgcggtgtttgtcgatagcggcgaagcggtaagcgatattcgccgcagcgactttaaaaccggtaccggggtcggcgtgcgctgggaatcgccggtcgggccaatcaaactcgattttgccgtaccggtcgcggataaagacgaacacgggttacagttttacatcggtctggggccagaattatgagtttatggaaaaaaatcagcctcggcgtggttatcgttatcttactgttgctgggatcggtggcgtttctggtgggcaccaccagcggcctgcatctggtatttaaagcggcggatcgctgggtgccaggactggatattggcaaggtcaccggcggctggcgtgatctcaccttgtctgacgttcgttatgagcagccaggcgtggcggtaaaagcgggcaatctgcatctggcggtcgggcttgagtgcctgtggaacagtagcgtttgtattaatgatctggcgctgaaagacattcaggtcaacatcgacagtaaaaaaatgcctccttctgaacaggttgaagaagaggaagatagcggtccgctggatctctccacgccgtatcccattaccctgacacgggtggcgctggacaacgtcaacgtcaagattgatgacaccacggtatcggtgatggacttcacctccggcctgaactggcaggagaaaaccctgaccctgaaaccgacatcgctgaaaggcctgttgattgctttgccgaaagtggcggaagcggcacaggaagaagtggtcgaaccgaaaattgaaaatccgcagccggaggaaaagccgctcggcgaaacgctgaaagatctcttttctcgcccggtattgccggaaatgaccgacgtgcatttgccgcttaacctgaacattgaagagtttaagggcgagcagctgcgcgtgacgggcgacacggacatcaccgtgagcaccatgctgctgaaagtgagcagcattgacggcaatactaaactggacgccctggatatcgactccagtcaagggatcgtcaacgccagcggcacggcgcagctgtcagacaactggccggtggatatcaccctcaacagcacactgaacgtggagccgttgaaaggtgaaaaggtgaagctgaaagtgggcggtgcgctgcgcgaacaggtggagattggcgttaacctttccggtccggtggatatggatttacgcgcccagacgcgactggcagaagctggattgccgctcaacgtggaagtgaacagcaaacagctttactggccgttcactggtgagaagcagtatcaggcggatgatctgaaactgaaacttaccggcaaaatgaccgattacacgctctctatgcgcacggctgttaagggccaggagatcccgccagccaccattacccttgatgccaaaggtaatgaacagcaggtcaatctcgacaaacttaccgtcgcggcgctggaagggaaaacggaacttaaggcgttgctcgactggcagcaggccattagttggcgcggtgagctaacgcttaacggcattaacaccgccaaagagatcccggagtggccgtcgaaactcaatggcttgattaaaacccgcggtagcctgtacggcggcacctggcagatggaggtgccagaactgaagctgaccggtaacgtcaaacagaacaaagtgaacgttgacggcacgctgaaaggcaacagttatatgcagtggatgatcccagggctgcatctggaactggggccaaacagtgccgaagtgaaaggcgagctgggggtaaaagatctcaatcttgatgccaccatcaacgcgccggggctggataacgcgctgccggggcttggcggtacagcgaaagggctggtgaaagtacgcggcacggtggaagcgccacaactactggcagatatcaccgcgcgcggcctgcgctggcaggaactttccgtggcgcaggttcgcgtggaaggcgacattaaatccaccgatcagatcgccgggaaactcgacgtacgcgttgagcaaatttcgcaaccggatgtaaatatcaacctcgtcaccctgaatgccaaaggcagtgaaaagcagcacgagctacagttgcggattcagggcgagcctgtctccgggcagcttaatctggcaggaagttttgatcgcaaagaagaacgctggaagggaactcttagcaatacccgcttccagacgccggtcggcccgtggtcgctgacccgcgatattgcgctggattaccgcaataaggagcaaaaaatcagcatcgggccacactgctggcttaacccgaatgcggaactgtgcgtgccgcaaactatcgatgcgggtgccgaagggcgtgcggtggtgaatctcaaccgcttcgacctggccatgctgaaaccatttatgccagaaaccactcaggccagcggtctcttcacgggtaaagcggacgttgcctgggacaccacgaaagaggggctgccgcagggcagtatcactctttcggggcgtaatgtgcaggtgacgcaaaccgtcaacgatgcggcgctgcccgtggcgtttcagacgctgaatctgacggcggagttgcgtaacaaccgtgccgaattgggctggaccatccgcctgaccaataacggccagtttgatggtcaggtgcaggtgaccgatccgcaaggccgccgtaatcttggtggcaacgtcaatatccgtaacttcaaccttgcgatgataaaccccatctttacccgtggggaaaaagccgcggggatggtgagtgccaacttgcgtctgggtggtgatgtgcaaagcccgcagttgtttggtcagcttcaggttacgggggtggatatcgacggcaactttatgccgtttgatatgcaaccgagccagcttgcggtcaactttaacggtatgcgctcgacgcttgcaggtaccgtgcggacccagcagggtgaaatctacctgaacggtgatgccgactggagccagattgaaaactggcgggcgcgggtaacagcgaagggcagtaaagtgcgtatcaccgtgccgccgatggtacgaatggatgtatcgccagatgttgtattcgaggctacaccaaacctgtttaccctcgatggtcgcgtggatgttccgtgggcgcgcatcgtggtgcacgatctgccggaaagcgcagtaggcgtttccagcgatgtggtgatgcttaacgataacctgcaaccggaagagccgaaaacggcgtcgattccgattaacagtaacctgactgtccacgttggcaacaatgtgcgcattgacgcctttggcctgaaagcgcggctgacgggcgatctcaacgtcgttcaggacaaacaagggctgggcctgaacgggcagatcaacatccctgaagggcgcttccatgcctatggtcaggatctgattgtgcgtaagggtgagctactgttctctggtccgccagatcaaccgtatcttaatatcgaagctattcgtaacccggatgctacagaagacgacgtcatcgccggagttcgcgtcactggtctggcggacgaaccgaaagcggagatcttctctgacccggcgatgtcgcaacaagctgcattgtcttatttgctacgtggacaagggctggagagcgatcagagcgacagcgcggcgatgacctcgatgctgattggcctgggggttgcgcaaagtggccagattgtgggtaaaatcggcgagacgtttggcgtaagcaatttagcgctcgacaccgagggagttggcgactcctcccaggtggtggtcagcggctatgtattgccaggcctgcaagtgaaatacggcgtgggtatatttgactctatagcaacactcacgttacgttatcgcctgatgcctaagctatatctggaagccgtgtctggtgtagaccaggcactggatttgctctatcagttcgagttttagcaatgcgaatatttgtctacggcagtttacgccacaaacaaggcaacagtcactggatgaccaatgcccagttactgggcgatttcagtattgataactaccagttgtatagcctgggccactatccaggcgcagttccggggaacggaacagtacatggtgaagtttatcgtattgacaacgccacgctggccgaacttgatgccttgcgcaccaggggcggtgaatacgcgcgccagttgattcagacgccgtacgggagtgcatggatgtacgtttatcaacgacccgtcgatggattaaagctaattgaaagcggcgactggttagacagggataagtaataataaaagcacgccaccttcgggtggcgttgttttatccaccagcctgaatatattccgaatttgacgccattcttatcttttcttaaatgctgatttgttgcgcagtgttataaacacctggcacgctcaacaaggacgcgaccacaatgaaaaaatctcttctggctgtaatgctgacaggactgtttgctctcgtttctcttcccgctctgggaaatgtcaatctcgaacaattaaagcaaaaagctgaaagtggagaagctaaagcacagttggagctgggatatcgctattttcagggtaatgaaacgacaaaggatctcacccaggcgatggactggtttcgccgtgccgcagagcagggatacaccccggcagaatatgtactggggttacgctatatgaacggtgaaggtgtgccgcaagattatgctcaggcagttatctggtacaaaaaagcggcactgaaggggcttccgcaagcgcagcagaatctgggtgtaatgtaccatgaaggtaatggcgtgaaggttgataaagccgaatctgtgaaatggtttcgcctggcagcagagcaaggtcgtgacagcggccagcaaagtatgggagacgcatattttgaaggcgatggtgtgacgcgggattacgttatggcacgtgagtggtatagcaaagcagcggaacaaggtaacgtctggtcctgtaaccagcttggttatatgtattccagaggtttaggcgttgaaagaaacgatgccatatcggcacaatggtatcgaaaatcagcgacatcaggcgacgagttggggcagcttcatttagccgatatgtactatttcggtatcggtgttactcaggattacactcagtcacgggtattattttcccagtcggcagagcagggaaattctattgcgcagtttcgtctgggatatatattggagcaaggtttagcgggagcgaaagagccgttaaaagcactggagtggtaccgtaaatcggcagaacagggaaattccgatggtcagtattatttggctcatctgtatgataaaggcgcagaaggtgtagcaaaaaatcgagaacaagccatctcctggtacacgaaatcggcagaacagggggatgctaccgcacaggctaatctcggcgctatttacttcagacttggttcagaagaagaacataaaaaggcggtggaatggtttcgcaaggccgccgcaaagggtgagaaagcggcgcaatttaatttgggtaatgctttactccagggaaaaggtgttaaaaaagatgagcaacaggccgcaatctggatgcgaaaagccgcagagcaaggattaagtgcagcgcaggtacaattaggtgaaatctattattatggcttgggcgtagaacgtgattatgtgcaggcctgggcgtggttcgataccgcatcgaccaatgatatgaatctttttggtacagaaaaccgcaacattacagagaaaaaactgacagccaaacaactgcaacaggctgaattattatcgcaacaatatatagaaaaatatgccccggaagcctgggcgagaatgcaaaagcttaaagcgcaatcagcggtaaagacgggtaataaataacgggtaactgtcagatcaggtctgcgctaatacagctcaaccaatgccacctgcgggtggcgttatttttttgcgagacgacgcgtattcttttttgtaacttcctcgccttttgcttttccttccgagccgctttccatatccgttaacgcatgtaaaactctgctggcgttaacaaatgtgcaggggtaaaacgggggcacgctttgaacggtgagtatgagtgaggccggctaacttccagcaagtggctatgaacagcaaaatggtggtcgagtttagcttgttcttaccgttcaagcctttaaactgctgaaaataataatagtggagtagagagtttataaattgcgggcataaaaaaacccctactaaccgaagcccggcgttcagggttattacgccagaagaacttatttattcttggcgcgctcgaaggaagcaacgatttcagctttagcggcttctgcgttttcccaaccttcaactttaacccacttgcctttttcgaggtctttgtagtgctcgaagaagtgagcgatttgcgctttcagcagctctggcagatcgttaacgtctttaatgtgatcgtattctttgctcagcttggtgtgcggaacagcaatcagtttcgcatcttcaccggcttcgtcggtcattttcagtacgccaaccggacggcagcggatcacagaacccggctgcagcgggtacggagtcgggaccagtacgtcaaccgggtcaccgtccagagacagagtgtggttgatgtaaccgtagttgcacggatagaacatcgcggtggacatgaagcggtcaacgaacagtgcgccgctctctttgtcgatttcgtatttgatcggatctgcgttagccgggatctcaataacaacgtagatgtcttccggcagatctttacccgcagggacgttgagtaagctcatgtctgtttcctttaaaaatatgtggcaaacaagtgccgagtattatagccaactcgcgccgaatgtcttcgcttgttttcgtcttcattttcctttttcgccagttttaagacggtatacagagcaggaaaatccataaccgtagccgcatttttcatagtgagatgaaagcgattacaaacttgtgattaacgttttatttacttttttgaagtgtgatgtaacgcaatccgttacataacgaattgtctatagttttttcgcgaacatcttttcaccaataataattaccccgacgaggacaaccctatgtggaaacgcttacttgtagtctctgcagtctcggcagccatgtcgtctatggcgttggccgctccattaaccgtaggattttcgcaggtcggatcggaatccggctggcgcgccgcagaaaccaatgtggcgaaaagtgaagccgaaaaacgcggtatcacactgaaaattgccgatggtcagcaaaagcaggaaaaccagattaaagcggtacgttccttcgtcgcacaaggggtggatgcgatctttatcgctccggtggtggcgacgggttgggagccggtattaaaagaggcgaaagatgccgaaatcccggtcttcttgcttgaccgttccatcgatgtgaaagacaaatctctctatatgaccaccgttactgccgacaacatcctcgaaggcaagttgatcggtgactggctggtaaaagaagtgaatggcaaaccatgcaacgtggtggagctgcagggcaccgttggggccagcgtcgccattgaccgtaagaaaggctttgccgaagccattaggaatgcgccaaatatcaaaattatccgctcgcagtcaggtgacttcacccgcagcaaaggcaaagaagtgatggagagctttatcaaagcggaaaacaacggcaaaaacatctgcatggtttacgcccataacgatgacatggtgattggtgcaattcaggcaattaaagaagcgggcctgaaaccgggcaaagatatcctgacaggctctatcgacggcgtgccggacatctacaaagcgatgattgatggcgaagcgaacgccagcgttgaactgacgccgaacatggcaggccccgcttttgatgcgctggagaaatataaaaaagacggcaccatgcctgaaaagctaaccctgaccaaatccaccctttatctgcctgataccgcaaaagaagagttagagaagaagaaaaatatggggtattgagggttgctatgcctgatgccgattcgtaggccggataaggcgctcgcgccgcatccggcggtggtgcgctgaagcctgatgcgacgcttaccgcgtcttatcatgcctactgggagcacgctttacaccgggggaaaccatgacgaccgaccaacaccaggaaatcctccgcaccgaaggattaagtaaatttttccccggtgtcaaagcgttagacaacgttgatttcagcctgcgccgtggtgaaatcatggcgctgctcggtgaaaacggggcgggaaaatcgacgctcatcaaagcattaaccggtgtataccacgccgatcgcggcaccatctggctggaaggccaggctatctcaccgaaaaacaccgcccacgcacaacaactcggcatcggcaccgtctatcaggaagtcaacctgctacccaatatgtcggtcgctgataatctattcataggtcgcgaacccaaacgtttcggccttctacgccgtaaagagatggaaaagcgctccaccgaactgatggcatcttacggtttctccctcgacgtgcgcgaaccgctcaaccgcttttcagtcgcgatgcagcaaatcgtcgccatttgccgggctatcgatctctccgccaaagtgctgatcctcgatgaacccaccgccagtctcgacactcaggaagtagagttactgtttggcctgatgcgtcaacttcgcgatcgcggcgtcagcctgatcttcgtcactcattttctcgatcaggtttatcaggttagcgatcggatcaccgtcttacgcaacggcagttttgtgggctgtcgggaaacccgcgagctaccgcagatcgaactggtaaaaatgatgctggggcgtgagctggacacccacgcgcttcagcgtgccgggagaacattgctgagcgacaaacctgttgccgcgttcaagaattacggcaaaaaaggaacgatcgcgccgtttgatctcgaagtgcgccccggcgagatcgtcggtctggcaggcttgctgggatcaggacgtaccgaaaccgccgaagtgatcttcggtatcaaacctgctgacagcggcactgcgttgatcaaaggcaaaccgcaaacgctacgctcgccacatcaggcttcggttcttggcattggcttctgcccggaagacaggaaaaccgatggcatcatcgctgccgcctcggtgcgggaaaatatcatccttgctctccaggcccagcgcggctggctacgacctatttcccgtaaagaacagcaagagattgccgaacgctttatccgccagcttggcattcgcacaccttcaactgaacaaccgattgaatttctctccggcggcaatcagcaaaaagtgttgctttcacgttggctactgacccgaccgcaatttctgatcctcgacgagccaacgcgcggaattgatgttggtgcccacgccgagatcatccgcctgattgaaacgctgtgcgccgatgggctggcgctgctggtgatctcctccgagctggaagagctggtgggctatgccgatcgggtgattatcatgcgcgatcgcaaacaggtggcggagatcccgctggcagagctttccgttccggcgatcatgaacgccattgcggcgtaaggagaacagtgtgatgcctcaatctctcccggacactacgccgccgaaaaggcgttttcgctggccaacaggaatgccgcagctggcggcactgttgctggtgctgctggttgatagcctggtggccccacatttctggcaggtggtgcttcaggatgggcgtttgttcggtagccctatcgacattcttaaccgtgcggcccccgttgcgctactggcgattggcatgacgctggttatcgccaccggtgggattgatctctccgtaggggcggtgatggctatcgccggagccacaacggctgcgatgacggtcgcgggattcagcctgccaattgttttgttaagcgccctgggcactggcatcctggcgggattgtggaacggcatactggtagcgatcctcaaaattcagccgtttgtcgccaccctgatcctgatggtcgccgggcgcggcgtggcgcaactgatcacctccggacagatcgtcacatttaactcaccggatctctcctggttcggcagtggatcgctgttgttcctgccaacgccagtcattattgcggtgctgacgcttctcctgttctggctgttgacccgcaaaacggcactggggatgtttatcgaagccgttggtatcaacattcgggcggcaaaaaatgccggggtaaacacgcggatcatcgtcatgctcacctacgtgttgagcgggctatgtgcggcgattgcgggcattatcgtggcggcggatattcgcggtgccgatgccaacaatgccggattatggctggagctggacgccattcttgcagtggtgattggcggcggatcgctgatgggcgggcgctttaacctgctgctttcggtggtgggggcgctgattattcagggaatgaacaccggaattttgctttctggctttccgccggagatgaaccaggtggtgaaagcggtggtggtgctttgcgtgctgattgttcagtcgcaacgctttatcagtctgattaaaggggtacgtaaccgtgataaaacgtaatttgccactgatgatcaccatcggcgtctttgtgttgggttatatctactgtctgacccagtttcccggttttgcttccacaagagtgatctgcaatatcctgaccgataatgcctttcttgggataatcgccgttggcatgacctttgtgatcctctccggtgggatcgatctctccgtcggttcggtgatcgcctttaccggcgtgtttctggcaaaagtgattggcgatttcggcctctcgccgctgctggcgtttccgctggtgttggtgatgggctgtgccttcggcgcatttatgggacttctgatcgacgccctgaagatcccggcgtttatcattactttggccggaatgttctttttgcgtggcgtcagctatctcgtttcggaagagtcgatcccgataaaccatcctgtttatgacacgctctcaagccttgcgtggaaaatccctggcggcggtcgcttaagtgcgatgggactgctgatgctggcggtggtggttatcggcatattcctcgcgcatcgtacccgttttggtaatcaggtatacgccattggcggcaacgcaacgtcggcaaacctgatggggatttccacttgcagcaccactattcgcatttatatgctctccaccggactggcaacgctggcggggattgtcttctcgatttatacccaggccggatatgcactggcgggcgtaggtgtggaactggatgctatcgcctcagtggtaattggcggtacgcttttgagtggtggcgttggaacggtattagggacgctttttggcgtggcgattcagggactgattcagacttacataaactttgatggcacgctgagttcctggtggacgaaaatcgccatcggtattttgttgtttatttttatagcattacagcgtggattaacggtgctgtgggagaatcgtcagagttcgccagtgacaagagtcaacattgcgcagcgataaaaacgcctctccgtgtggagaggcgcaggagcttacgcgtccgggaactcacggataaagcgttcgacatcttcaaccatatggtcgttgccgacaaagaacgaacggcgctggtgcagggtttccgggataatatccagaatacgctctttgccatcgctcgctttaccgcccgcttgttccgccaggaatgccatcgggttgcactcatacagtaaacgtagtttaccgtccgggtggctggcggtgcttgggtagagataaataccgcctttcagcaggttacggtggaaatccgcgaccagtgaaccgatataacgtgaggtatacgggcggttggtggatttatcttcttcctggcagaatttaatgtacttcttcaccccgttcggaaacttaatgtagtttccttcgttgatggagtaggttttgcctttctccgggaagcgcatccgttcctggcacaggcagaaaacacccagcgaaggatcataagtaaaggcgtgaacaccgcatccggtggtgtaaaccagcatagtagaggagccgtataccacgtaacctgccgcaacctgtttgttaccaggctggaggaaatcttcttccgttaccggcgtgccaacaggcgtaacgcggcggtagatggagaaaatggtaccgacagagacgttaacatcgatgttggacgagccatccagtgggtccatcagcaccacgtattttgcgtgttcacagccttcaaagacgacaatctcatcttcttcttcagaggcaatgcccgcaacgatatcgcgtgctttcagtgcggctttcagtttctcattagcgaacaggtcgagtttctgctgaacctcgccctgcacgttctcagcaccgctggcacccaggatatcaaccagtcctgctttgttgatatcgcgatggataatcttggcgcccagttttattgccgacagcaaagcagtgagctcaccggtagcatgagaaaactcgtgctgcttttcgacaataaattcacctaacgttttcataaaactttccctgcaatgtttatggagtaaagcgaccgcaacaatcttaacaaataatcccaatgttgcgctcaggtgaatcgcgccagcaaattacggattatcctgaaatgcgtttctcacttgcccgacatatgcgtaaaatgagcgccagattaaaaaaggatagtgacgtatgcgcattcatattttaggaatttgtggcacgtttatgggcggtctggcgatgctggcgcgccagttaggccatgaagtaacgggttcggacgccaatgtgtatccgccgatgagcaccttacttgagaagcaaggcattgaactgattcagggttacgatgccagccagctcgatccacagccggatctggtgattattggtaacgccatgacccgtggaaatccgtgtgtggaagcggtactggaaaaaaacatcccttatatgtcaggtccgcagtggctgcacgattttgtgctgcgcgaccgctgggtgctggccgttgccggtacacacggcaaaaccaccacggcgggaatggcgacctggattctggaacaatgcggttacaaaccgggatttgtgatcggcggtgtgccggggaactttgaggtttcggcgcgtctgggcgaaagcgacttctttgttatcgaagcggatgagtacgactgcgccttcttcgacaaacgctctaaatttgtccattactgcccgcgtacgctgatcctcaacaaccttgagttcgatcacgccgatatctttgacgacctgaaagcgatccagaaacagttccaccatctggtgcgtatcgttccggtgcagggccgtattatctggccggaaaacgatatcaacctgaaacagaccatggcgatgggctgttggagcgagcaggagctggtgggcgagcaaggtcactggcaggcgaaaaagctgaccactgacgcttctgaatgggaagtcttgctggatggcgaaaaagtgggcgaagtgaaatggtcgctggtaggcgaacataatatgcacaatggcctgatggcgattgcggcggctcgccatgttggtgtagcgccggcagatgccgctaacgcgctgggttcgtttattaacgctcgtcgccgtctggagttgcgtggtgaagcgaatggcgtcacggtatatgacgattttgcccatcacccgacggcgattctggcaacgcttgcggcgctgcgtggcaaagttggtggtacggcgcgcattattgccgtgctggaaccgcgctcaaacaccatgaaaatggggatctgcaaagacgatctggcaccttcattaggtcgtgccgatgaagtcttcctgctgcaaccggcgcatattccgtggcaggtggcagaagtggcagaagcctgcgttcagcctgcacactggagcggcgatgtggatacgctggcagatatggtggtgaaaaccgctcagccgggcgatcacattctggtgatgagtaacggcggttttggtggtattcatcagaaactgctggatggtctggcgaagaaagcggaagccgcgcagtaattcacagcctcagcctgatagagtgtgtgtaggccggataaggcgttcacgccgcatccggcatttgagcatagtgcctgatgcgacgcttgatgcgtcttatcaggcctacaggtgcaccgcatccggcaaaccatactcacatcaacaacgaaaattacccttcgttttccgctaactcacgcagatactggaaaatctggcgcgcggatttcggcggcttattcccttctttctctttcttcgcgttacggatcagagtacgcagttgctgacgatcggcatcgggccacagattcaatacttcagcgatggcgtcatcaccttgctcgatcagacgatcgcgcaggttttccagtttatggaacaacaccacttgctggttgtggcggtttttcagcttatccagcgcctgacggatcggctcaacatcgcgctggcgcagcatcttaccgatgagctgcaactggcggcggcgaccttccatcttaatacgctgggcgagctcaatagccgcgcgcagatccgcatctaacgggatcttatccagcgcgtttttccccagatcaacaatttctgcgcccaggcgttttagctcctcggcatcgcgtttaatttcacttttactgacccagataatttcatcgtcttcgtcttcgatgtcatcaccgggaacgtcgtcgagccagtcttcgggctgcttagtcatctcaggctccttaaaaaaagaggctaatgttaccagttaagatgcgcactgaaaaacggttctctgttagacttcagagaaactctctacattatggcacttgcaatgaaagtaatctctcaagttgaagcgcagcgcaagattctggaagaagcagtttcgactgcgctggagttggcctcaggcaaatcggacggtgcagaagttgccgtcagcaagaccaccggcattagcgtaagcacgcgttatggtgaagtggagaatgttgaattcaatagcgatggcgcgctggggatcaccgtttatcaccagaaccgtaaaggtagcgcatcgtctaccgatttaagcccgcaggccattgcccgcaccgtacaggcggcgctggatattgcccgttatacctcgccagatccgtatgcaggcgtggcagacaaagaactgctggcttttgacgcgccggatcttgacttgttccaccctgcggacgtttctccggatgaagccattgaactggcggcccgcgcggaacaggcggcattacaggcggacaaacgcatcaccaataccgaaggcggtagctttaacagccactacggtgtcaaagtttttggcaacagccacggcatgttgcagggttactgctcaacgcgtcattcgctctccagttgtgtaatcgccgaagaaaatggcgatatggagcgcgattatgcctacaccattgggcgtgcgatgagcgatctacaaacgccagagtgggttggggccgactgtgctcgccgtaccttatcgcgcctgtcaccgcgtaaactttctaccatgaaagcgccggtgatttttgccaatgaagtggcaacagggttgtttggtcatttggtgggggcgatagcgggtggtgcggtctaccgtaaatcgaccttcttgctcgactcgctcggtacacaaattctgccggactggctgacaattgaagaacatccgcatctgctgaaagggctggcatctacaccattcgacagcgaaggtgtgcgcaccgagcgccgcgatatcgtcaaagatggcatcctgactcagtggctgctgaccagctattcggcgcggaaactggggctgaaaagcaccggacatgcgggcggtattcacaactggcggattgccggacaagggctaagcttcgaacaaatgctcaaagagatgggcaccgggctggtggtgacggagctgatgggccagggcgtgagtgccattaccggtgattattcccgtggtgcagcgggcttctgggtagagaacggcgaaattcagtatccggtgagcgaaatcaccatcgctggtaatttaaaagatatgtggcgcaatattgtcaccgtcggtaacgatattgaaacacgcagtaatatacagtgtggttctgtgctgttgccggagatgaaaatcgccgggcagtaaaaaaactggcgcgtcctgccgcgctataaactaaaaaattacacaaaatcattcgcactgcatcgagacggaaagtgaatgagagccggggagcgtactcgtagtacgtgactcgggcgaatgagcgtagccgtcgatgaggcagtgtgaaggatgaagtgtaaataaaaaaggaagtgagcaatgcgtaaaagcctgttagctattcttgcagtctcctcattggtattcagttcggcgtcgtttgccgctgatctggaagacaatatggaaaccctcaacgacaatttaaaagtggtcgaaaaagccgataacgcggtgcaagtcaaagacgcgttaactaaaatgcgcgctgcggcgctggatgcgcaaaaagcgacgccgccgaagcttgaaggcaaatcaccggacagcccggaaatgaaagacttccgccacggtttcgacattctggtcggtcagattgacgacgcgctgaagctggcaaatgaaggtaaagtaaaagaagcgcaggctgccgcagagcaactgaaaacgacccgcaacgcctatcaccagaagtatcgttaattctttatttccctgttgcctgcactcaggtaacagggaacttatcatcgcaaatgatgcaccacctgattgctgctgccgcgccagatcagggaagggtcttttaaatcctgcacaaatttgccgtcgaccagcacgttaatcaaatcaacaacctgcatttgcgcagcgttgagttcgtcgagtttatagcctgtccacatccagatgtctttacccggacactcggcgcggatgcgttgtaccagcttcagaatatccggcacgttttgcggatgtagcggatcgccgccggagagggaaataccctggcgtttgatgcgagtgtcattcagatcgttaatgatctggtcttccattgctttggtaaatggctgaccggaatttacccgccaggtgcttttgttatagcaaccggggcattcatgaacacacccggagacaaacagggtgcagcgagtgccggggccgttgacgatgtcgacaggatagtactgatgatagttcattatttcacctggcttatcagtccgcgtgtaggctgcatccggtaatcaacgcctgatgcgacgctgtcgcgtcttatcaggcctacagccgttgccaaatgtaggccggataaggcgtttacgccgcatccggcatttgcttaacacagagtgaagattaacctatctgcccatttcccaaatgtttaacgcggcgcttaacttcttcctgcttaccagcgttaaacggacgtgcatccgggctacctaaatatccgcacacgcggcgagtcaccgacacacgggaggtgtcatggttaccacatttcggacaagtgaagcctttgctggtgcactcaaattcgccggtaaagccacactcgtagcattcatcgatcggtgtgttggtgccgtaatacggtacatgctgatagctgtaatcccagacatcttccagcgccttcaggttgtgctgaatgtttggatactcgccatagcaaatgaagccaccgttcgccagtggcgggtaaggcgcttcaaagtcgatcttgtcgtacgggttcaccttcttctccacatcgaggtggaaactgttggtgtagtaacctttatcggtcacgcccggcaccacgccaaactcagcggtatcgagacggcagaagcggtcgcacaggttctcactcggcgtactgtagaggctgaaaccgtagccagtttcttctttccactgatccaccgcctgacgcagacgctcaacaatagcaatacctttcgcgcgcagctgctcgttgtcgtaaacatgctcgccgccgaacagcgcgttaatggtttcgtggatgccgatgtaacccagcgaaatagacgcacgaccgtttttgaagatttcagaaacgtcgtcgtcagcattcagacgcacgccacaagcgccttccatatagaggatcggggctacgcgcgctttcacgccttcgagacgagcgatacgggtcatcagcgccttacgtgccaacaccagacgttcatccagcagcttccagaaggtggcttcatcgccttttgcttccagagcaatacgcggcaggttcaggctgatcacgccgaggttgttacgaccatcgtggatctgctcgccgttttcattttcccacacgccgaggaagctgcggcagcccatcggggttttaaacgaaccggtgactttcactacctgatcgtagttcaggatatccggatacatgcgcttgcttgcgcactccagcgccagctgtttgatgtcgtagttcggatcgccttttttatggttcaggccatcgcgaatcgcaaacaccagtttcgggaacaccgccgttttacggtttttaccgaggccggcgatacggttacgcaggatagattcctgaatcaggcgcgactcccagctggtgcccagaccaaaaccaaaggtcacaaacggtgtttgaccgttggcggtgtgcagggtgtttacttcgtactccagcgactggaaggcatcgtagcactctttgatggtacgagagttagcgtagccttcggcgtccgggatgttccactcttctgcggtcttgcgatgtttgttgtagctggcggtgacaaacggtgccagcacttcatcgatacggttaatggtggtgccgccataaatatggctggcgacctgagcaataatctgcgcagttaccgcggttgccgtagagatcgatttcggcggttcaatctcggcgttccccattttaaagccctgggtcagcatgcctttcaggtcgatcaacatgcagttgaacatcgggaagaacggtgagtaatcgagatcgtgatagtgaatatcaccacgttcgtgtgcctgcaccacgtcacgcggcagcaggtgctggcgtgcatagtgtttagccacgatcccggccagcaggtcgcgctgggttggaatcaccttgctgtctttgttggcgttttcgttgagtaacgaggagttggtctgctcgaccagaccacggatctcctggttcaggcgaccgcgtttttcacgttcaatgtcgcgatcgtgacggtactcgatgtaagcacgagccagttgtttgtatggccccgacatcagctggttttcaactgcggtctggatctcattgatatccacctggttgcggccctgcatctgctcgctgacaaccgcagcaacagtggcgcaataatcggcatcatcgacttccgctgctttagctgcacgcagaatcgcttctttgatgcgctctgatttaaacggcactttgcagccgtctcgtttcatcacatgcggtgtcatgatcgctccatatttttaagaacaggttatccacagaaattgggaaaggcgttttccggttttttcgtttcgttttccggtgctttccgcaatcgccatccgcttatccacaacgtcgcacctttttcgtggggagctgtagtagcaattatagtcgattaatacaacatattgggttgggacgcattttaaagtctatatatagtgctttgcatcaaggatgtttgaactttttttgatgtagctcaaagtaaaaagcagagcgtacggatgacgggcgctacagcgatatgtaaattttttaatgaattttttgattataaaatcaacaaaaacaacatactgacaggcaaaaccccggaatgacaggcattaccggggcttagcgaagatttacttctgtaaccaccagacagcctcaaaaggccgtaaagtcatggtacagggttgtggtgaggcttcttcgtagttatgcatcacaagctgccagttgccgagcattttccctggctgccagggttgggtctcacggctaaggttggcaatgaccagcaaggtttgccccttccactcacggcgatagcaccacaatacagggctgtttggcagcagatcctggtaatcgccccatgtcaggacggcttcttgcttacgcagtgcgattaacttttggtaggtgtaaaacaccgaggactcatcggccagcgctgcttctacgttgatttcctgatagttatcgcccaggccaatccacggttcgccagccgtaaacccggcattatcgccgttggtccattgcatgggtgtgcgactgttgtcacgggatttactggcgaggattgccaataactcgtcggcatcacgcccatcgttgcgcagctcggcaaacatattgaggctctccacgtcgcgatagtcagtaatgcgcgtgaaatgtgggttggtcatgccaatctcttcgccctggtagatatacggcgttccctgcatgccatgcagcaccatcgccagcatttttgccgcaggcacgcggtattcaccttcatcaccaaagcgagaaacaatgcgcggctgatcgtggttacaccagaacaaggcattccatgccacgttgtgcattccttgttgccagtggcggaacaatgttttcaacgccacaaagtcaggtttagccagcgtccatttttcacctccgggataatcgaccttcaggtgatgaaaattaaaggtcatcgacaattcactgcctgtcagtgccgcgtatcgctggcaatgctcaaggctggtggaggacatttcacctacggtcattaacccgcgtggcgtaaacacatcgcggttcatctcgtgcaaaaactcgtgtgctcgtggcccgtcggtatagaagcgacgcccgtcgccatccaggtcttcagggtaacgcggatctttggagatcagattcaccacatccaggcgcaacccgtcgaccccacgatcggcccagaactcacagacttttttcagctctgcgcgtaccgctggattctcccagttgagatccgcctgttctggtgcaaagagatgcaaatagtactgttcgctttctgcatgccagcgccacgcactaccaccgaattttgaacgccagttgttcggtggcgtttctggttctccatcgcgccagatataaaactggcggtaagggctttctttgttcagcgcctcgcgaaaccaggcatgttgggtagaggtatggttaaacaccatatcgagaatgatacgaatcccacgcgattttgcctgtgtcaccagttcgtcaaaatcgtccagcgtgccataggtgggatcaatcgccgtataattcgctacgtcgtaaccgttatcgacctggggagagacataaaagggggttagccagatggcatcaacgcccagtttatgcagatagtccaggcgttggataacgccacgtaaatcgccggtgccgctacccgtggtgtcctgaaaactctttggataaatctggtagataacgccgttttgccaccagtggggaagatgagtcattacgttattcctgcaaatgcgagggggcgcaattgcgccccgaagaaaattaaacaatgtccagcgtgcccaggcggtatttccgctgatagataaacgaggtgagtacaatcgggatgatgatggcgatagccattgccagcgcaaacacctgccagtagctcggctgaatcgagagaattcccggcaggccgcctacgccgatgccattcgccataacgccgttcaggccgcatagcaatcctgccagaccagaaccaatcatcgcgcacagcatcgggaagcgatatttcaggttgatgccgtacatagcaggctcagtgactccaagccaggcggagatagcggcaggcacggagatctcgcgttcattgtgcttgcggctggaaatgataatacctatcacggcggagccctgagcaatattcgacagcgcaatcagcggccacactggcgtgccacccatgctttgaatcatctgcaaatcaatagcaagcgtggtctggtgtacgccggtgatcaccagcggggcgtacaggaagccaaacaatgccgcgccaatcggagcaaagctgccggtcatcaggtgacgtaccgcaaaggcaacgccatcgccaatcatgcgaccaaacggaccaatcagcgcatgggcgaggaacaccgcgaggatcagcgaacagacgggcaccaccaccagatagaggtaatccggcacgatgcgcttaagacgagtttcaataacgcccagcgccagtccggctaacagtgccgggatgacctgcgcctgatagcccactttggcgatgctgaatatgccaaagtcccatacttccggcagctgctgcccgagcagataagcgttcatcagctgtggagaaaccagcgttacgccaagcacgataccgaggatcggtgtaccacccatttttttcaccgctgaccagcaaatcccgaccggcaggtagaagaagatcgcttcaccgatcaaccacagaaaatcgtagatcgtttgcagggaagggtacatttgcgccagcgtctgaccgttgctcatgggcaaatcgccgatcacattgcgaaaaccgaggatcaaaccaccactaatcaacgcgggcagcaatgggaagaagatctccgcgaaatgagagatcaactgctcatgccatttcatattctgccgggcggctttttttacctgctctttatcaacctgcgcctgtccggttgacgcaatcagtgcttgatagtaatcacccacgttggtgccaatcaccacctgaaattgcccggcattggtgaaacagcctttcaccatggggagttgctcaatttctttcggtctggcattggccggttggttgaggacaaagcgcaggcgagtaatacagtggctcaccgtcgcaatattgccgcgcccgccgaccatttcaatcaaccgatcgatatccgtttggtttattttgctcatcataaagccccatggcagatgacatttttggttggctgcagaatatattgcgcggaaaaatttaaaaacgggaacgttcccgaaacacagcgaagatcacaatttatcgttcgggaaacgatcaggacagggtggcggggatgatgatttgttgcggttcgctgcgcccggtgacctgcgcgatcaactggcaggccgcctggcgtccagcttcggcgtaaccgggatctacggtgacgatctccggatggaggaatttcattaacggtgtattaccgacgctcgccagttgcaaggtgtcgatgcgttgctcttgcaggtatttacttgcgccaagtgccagcgtgtcggttgcgcacagtaacgcggtagtttcaggcgtaatcacttttgctacgttctcatagccttgcttcatagcaagccctggcagagcggcaacgggatgcagtttatgcgctttgcagaacgccaggtaggcttcgtgacgtcgcttaccggtcgtcacgtcactgtgcggcacgccgagatagctgatattacgatgtccctggtcatacagccgttgcatcaggatcttgattgccccttcgtcgtcataacagaccgaagcaaagccttttgcgtcacgcgccagcagaaccagcgatgactgccagtgggctaacatttcttctgttatgccggtaaaaccgaacagcactacgccgtcgatattacgccgtttcagcacccccaaatgttcggcaactaattgtggggaaaactgactttccatcatgattggatcgtaaccttgttcatagaacgctggcagcatggtttgaacggcgagattttctgacaacgaatccagacgggtaacaatgatggcgaccactttatcgctttgcccacgcatagcgcgcgcagagcgggaaggggaaaatccatgctgattcatcactgcttcaacacgctcgcgcgtgcgctggctcacgccgctttcgttattcagcacccgggaaaccgtagatttccccacgccgcttaagcgcgcgatgtctttgatggtcagccgattttgcatcctgttgtcccataacgtgttgtttaattatttgagcctaactttacctgtgcattcagcaatgggtaaagtctggtttatcgttggtttagttgccagcaggtattatatcgccataaatgctacgaatattattggattctccttattatttgcggcgcttttttcacttaccggaggttatatggaacctgatcccacgcctctccctcgacggagattaaaacttttccggtaagcccgtcttttcacggcgttaccggatgcgtaaggccgtgacgttttaacgtccctgctcagctttattaccttcaggtaaggcttcgccacgcctgaagacatttctgtactgtttcagacagtgcggagggactccttatgtttaaagaaatttttacccggctcattcgccatttaccttcccgtctggttcatcgtgatccattgcctggcgcgcagcagacagtgaatgcggcggtcccgccttctttaagtgcgcattgcctgaaaatggcggtgatgcccgaagaagaattgtggaaaacgttcgacacccatccggaagggttaaatctggcggaagtggaatctgcccgcgaacaacatggtgaaaataaattacccgcacaacaaccgtcgccgtggtgggtacatttatgggtctgctatcgcaacccctttaatattttgctcaccattcttggtgctatttcttacgccacggaagatttatttgccgcaggtgttatcgcgctaatggtcgctatttctacgttgctgaactttattcaggaagctcgttccaccaaagcggcagatgccctgaaagcgatggtcagtaataccgcgacggtactgcgagtaattaacgacaaaggcgaaaatggctggctggagatcccgatagaccagctggtgcccggcgatattataaaactggcggcgggggatatgatcccggcagatttacgtatcttgcaggcgcgggatctgtttgtcgctcaggcgtcgttaaccggtgagtctctgcccgtagaaaaagccgctaccactcgccagccggagcacagcaatccgctggagtgcgacaccctgtgttttatgggcaccaccgtggtgagcggcacggcacaagcaatggtgattgccacaggtgccaatacctggtttggtcaactggcgggtcgtgttagtgagcaggaaagcgagccgaatgcctttcagcaagggattagccgcgtcagtatgctgctgattcgctttatgctggtgatggctccggtggtgttgcttatcaatggttacactaaaggcgactggtgggaagctgcactgtttgcgctttcggtcgcggtaggcttaacgccagaaatgttgccgatgattgttacctcgacgctggcgcgtggcgcagtcaagttgtcgaaacagaaagtgatcgtcaaacatctggatgccattcagaactttggcgcaatggatattctgtgcactgataaaaccggcaccctgacacaggataaaattgtgctggagaatcataccgatatctccggtaaaactagcgaacgcgtgctgcatagcgcgtggttgaacagccattaccagaccgggcttaaaaacctgcttgatacagcggtgctcgaaggtacggatgaagagtcagcgcgctcgctggccagccgttggcaaaaaattgatgagattccatttgatttcgagcgtcgtcggatgtcggtggttgtggcagaaaataccgaacaccatcagttggtttgcaaaggcgcattgcaggaaatcctcaatgtgtgttcgcaagtgcgtcacaatggcgagattgtaccgctcgatgacaccatgctgcgtaagattaagcgggttactgatacgctgaatcgtcaggggctgcgcgtggttgcggtggcgacgaaatacctgccagcgcgtgaaggagattaccagcgggcggatgaatccgacctgatcctcgaaggatatattgctttccttgatccgccaaaagagacaaccgctccggcactgaaggcattaaaagcgagtggaattaccgtaaaaatccttactggcgacagtgagttagttgcagcgaaagtgtgccatgaagtggggctggacgcgggagaggtggtcattggtagtgatattgaaacgctatctgacgacgaactggcaaatctcgcacagcgcaccacgctgtttgctcgcctgacgccgatgcataaagaacgcattgtgaccttactgaagcgcgaagggcatgtggttggctttatgggcgatggtattaatgatgcgcccgccttacgtgctgcggatatcggcatttctgtggacggcgcggtagatattgcccgtgaagcggctgatatcatcctactggaaaaaagcctgatggtgctggaagagggggttattgagggacgtcgcactttcgccaacatgctgaaatacatcaaaatgacggcgagctctaacttcggtaatgtgttcagcgtgctggtggcgagtgctttcttgcccttcctgccgatgttgccgctacacttgcttattcaaaatctgctgtacgatgtgtcacaggtggcgatcccatttgataacgtcgacgacgagcaaattcaaaagccgcagcgttggaatccggcggatctggggcgctttatggtcttcttcggaccgatcagctcgattttcgatattctgacgttttgcctgatgtggtgggtattccatgccaacacgccggaaacgcaaacgctgttccagtcgggctggtttgtggtgggcttactgtcgcaaacgctgattgtgcatatgatccgcacccgtcgtgtaccgtttattcagagctgtgcatcgtggccgttaatgattatgaccgtgatcgtgatgattgtcgggatcgcattgccgttttcaccgctggccagttatctgcagctgcaggcgctgccgttaagctatttcccgtggctggttgcgattctggcagggtatatgacgttaacccagttggtgaaagggttctatagccgtcgttacggttggcagtaaagaataaactgggcatggtggcccggaatcagattgcagacaaagtgagctttgttcatgccggatgcggcgtaaatgccttatcaggcctacaaattcaataaattgcaggaatcacgtaggcctgataagcgtagcgcatcaggcaattttgcgtttgtcattagacttaatccgggcatgatagcccggatttccatcaagattagcgacgaacagcgatcgcttcgatctcaatcttcacgtctttcggcagacgggcaacttcaacgcaagaacgtgccgggaaggtggcgttgtgttcggtgaagaaggcttcgtaggtagcattaacggttgcgaagtcgttcagatctttcacaaacacggtggttttaacgatatcgcccactttcaggccagcggcttcgacgatcgcttttacgttatccagcgactgacgcgcctgtgcagcgacatctgccgggacttcgcccgttttcgggtttaccgggatctgaccggaagtgataatcatattgcccagatcaacgccctgcacgtaaggaccgatagctgccggtgcattttccgtcgcgatagttttgctcatgatttctcctttattacagcggtaaaaagtctggctcattatagggagccagacttttattaccaaccgcaattaattggccagcaccacattatgagaaaactctttttcacagtatttgcatttgagcgcgatatcattggcgcgttttcgcacggcaaagctggatgaaaccggttcggcatggctgatacagttgctgttcgggcagaccagcacattgtcgatgcgctctggcagactggggcgcgatttgccaaccacttcatagttgtcgatacggttaaccgtggcttgcggtgcatataacgccagctgatcaacctgatcctcacttaaaaaggtattttcgattttgatcagatccttgcgccccatctcgccagaaggcaggttcagaccaatggtgatgcgctgatctgtttcggtcaacttgaacagactcaacagtttaaaaccgatctgggcggggatatggtcaattaccgtgccgcgtttaatagcttcaacctgcaatttattatcgtgtgtcatctctatttccccttacagtaccagatcgcgattcagaaccagtgccagtaacgcctggcgagcgaaaatcccgttgcctgcttgctggaagtaccaggcgtgaggcgttttatccacatccgtcgcaatctcatcaacacgcggcagcggatgcagcactttcatattggctttggcgttgtggagatcgctggcgcgaagaacaaactgcgctttcacgttggcgtactcggacgggtccagacgctctttttgcacgcgggtcatgtacaggatgtctacttccgccatcacttcttcaatagagctgtgcagactccaggcgatccctttttcatcgagcatatccagaatgtattgcggcattgccagcgcatccggcgcgataaagtaaaaacggttgccgtcgaacttcgctagcgcctgggtcagggagtgaacggtgcggccatatttcaggtcaccaaccattgcgacgtggagattgtccagacgcccctgggtttcctgaatggtgaataagtccagcaaggtttgcgtcggatgttggttggagccatcaccggcattcagtaccggtacattgccggaaaactcggtggccaggcgcgctgcaccttcctgcggatgacgcatcactatcgcatcgacgtaagtgctgataaccgaaatggtatcggccagcgtttcgccctttttacccagtgatgtattggcgctgtcggagaagcccaccacgctggcacccaggcggtgcatggaagtttcgaaagagaggcgggtgcgggtagaggcttcgaagaaacagctggcaataactttgtgcttcaacagctctggttgcgggttcgctttcagtttcgccgctgtcgccagcaccagattaaggtcatcgcgactaaggtcgtttatggaaatgatatgtttctgatatagcggattagccatcttttatctcctgacgcctgggcaaaaaaaagcccctcgattgaggggctgggaatgggtgatcaacgggaagaaaaacggcaggccagcgtcttttttcagacgcggtaagacaaaatgtcgaacacactgaaccatacatcctcccggcaaattgtccggcattatactcagctctgagagaggatcaagaagatgatgcagttataaagcaaggcaaacggttatcatgaatatatattcaattttaataagtaattaatttgcttgtgcaccagggctgtacgctttaccacacgtggtgcgacccaaacgatattgctgccagcaatcacgccaagaatttctggcaaagcatggaaatcaaggattcgcgctactgcccgaccatatccggcgacggtatggataaggataaattcaccattatgctcgacactcaggaccatttcagcgacggatcgacctgcgtcaggtgtgggaagtaattgaggattcaccgaataaattttttgtccttttgtatttctaatttttatgactcccagcaatttcagtagtcgtgaaacggttgactgactgatactgtcaaagccatggttttgcaaatcgcggcggatttcctcctgtgaaagataacttttttcggtaatcaggcgctgacagaccgccagttgcttcttttctttggcggagtaatcatcgtattccttcataatgcaccttttatttattattacctgatgatatttttcacattttataatgtgagagtggttcatttatcactacaccagatttgaaggccgctttgataagcggcctgtcgcgttaaatcatcgcggcgatactcagcacaatcatattcaacatcgtgagaatcagcagtagcggtgctacccatctcagataacggacccagggtacacgggcaatcgccagaccgcccatcactaccgcagaggttggcgtaatcaaattaaccaccccggaagcagactgataagcggtcaccaccagatcgcgttgtacatgagcaaaatcagcgagtggagccattattggcatcgttaacactgcaaggccggaagatgagggtaccagaaaagagagcaatacttccagccaataggtcacgttgatgaaaacagtggtggaaagccctgaaaccagattctcagcactgtgcagaattgtgtgcgtaatcatgccgttatccatcacgaccacaataccgcgggcgatgccgataatcagtgccacaccaaggagatcccgcgcgccgtcaataaaggtactggtgaaggtttcttcgcccatgcgggcaatgacacccacgatgaccgcagctgccagaaagacagcagagatttccgccatccaccaacccagtaccgctacgccgtaaatcataaaggcaaaggatgcagcaaaaagtatcaggatcgctttgcgcgtgggggtaaattccagcatcgtttctgaacgatttcccagaaaatgcgcctggttttcagccatcttatccgccacgatagagctttccggactgttgcgaactttgcgggcataacgcataacccagtaaacacaaatcacgtagcctactaacagcaaaataacacgcagcaaaatgccctgagtaaaggggatccctgcggcgttggcagcaatgacggtagcaaatgggttaatggttgagcccagcgtgccaatgcccgatcccaataacactgtggcggcagcgaccagaggatcaaagcgggcagccatcatgacgggcaccagcaacgtgtagaaggggagtgattcttccgccatcccataaatagtaccgccagcagcgaagagcgccatcaggatcggaatcatccactcttcccgaccattaaggcgagttgtcactcgttcgataccggcatctattgccccggttttatttactactcccaaaaatccaccgatgatcaggacaaacagcgcgacatcaatcgctcccgcagtgtaggtttgatggttgtacaagccgtcgatgggcgctaacaggacagccgtaataccctgtggttgtgcctcaacaggtgcgtaagtacctgcaacaggaacttcctttcccagtgcggcatttgtcaccatctgatattttcccgcaggtacaatccaggtcattgccgcaactaacgcaatcagcacgaacaagatggtataagcggtgggaaatttgaatttacccataatgtgatctccataatcacgggcatacgccactcgtcgacgcatgcccgtcagggttagtcgccgagagttgctaccatcaccgctttaatggtgtgcatccggttttctgcttcatcgaaaacaatagagtgggccgattcaaaaacctcttcagtaacttccagtcctttgaggccgtaggccatctcgatctcgcgtcctactgtggtgtgctcattatggaaggcgggcaggcagtgcataaatttaacttcagggttacgcgtggcagtaatcacctgttgattgatctgataaggtgccatcagactcactcgttctgcccaggcttcttttggctctcccatcgaaacccaaacatccgtatagagaaaatcaacgtcgtatacgccttcttccacatcctctgtcagggtgattctcgccccagtcacgctggcgatctcacggcattgtgttaccagcgcttcatctggccagaaagatttaggtgccaccagacggatatccatccccatttttgcagcaccaaccatcagcgagttccccatgttatttcgggcatcaccaagatacgcaaagctcagctctggcagcgttttgcctggcgcatgttccagcatggtcattaaatccgcgaggatctgtgtcgggtgaaattcattggtcagtccgttccataccggaacaccagcgaactcacctaattcttcaacgatattctgaccataaccgcgatactcaataccgtcatacatgcgtccgagtacgcgagcggtatctttcattgattctttatggccgatttgtgagccgctggggccgatgtaagtcacctgcgcaccttgatcaaaggccgcgacttcaaaggcacagcgggtacgggtagaggatttttcaaaaatcaacgcaatgtttttaccgaccagcgtttgtttttcgtttccagatttcttggcggctttaagattgatagccaaatcaatcaggtattgaatctctgctggggtgtaatcaagcagcttaagaaaattacggtttttcagtgaagtagccatggggatgtccttataaaaatggatcaagcgtggttatggggggtatcaaggcgaataagagtgcctttgtctccggcgagaatttccggaccatctgcaagagagccgatccctgcaatgccccggcactgactaacaaactttgcgcaggcggtgactttcggccccatagacccggcatcaaactgcatttcgttgagtaattccggcgtgacctgtgccagcgggcgttgggttggcttgccccagtcgagatatactgcgtccgcatcagtgaggatcaacaaggcgtcagcatggatctgacttgccagtagcgcggctgaaagatctttgtcgataaccgcttcaatcccatggtatccatcggctttttcaaccaccggaacaccaccgccaccattacagatcaccagatgatcgtgggcgatcagtgtctggatggcatcccgctcgacgatgcgtttaggttgtggagaaggtacgacccggcggaaagagtgaccatctgctttgaaaacccagcctttttctgcctgtagtacctgagtctgagcgtggtcataaattgggccgatgtacttagttgggttactgaaggcgggatcgttggcatccacttcaacctgcgtcagcagcacgctgatttcacgttgtggtagttgatttttcagcgcctgttgtagcatgtagccgatcatcccctggctttcggcccccagaatgtcgagtggatagggagcgacatgggcataggcgctattttgaagtgccagaagtccaacttgtgggccattcccgtgaaccagtacaacccgccagtgttgagtcagttgggcgatagttttagccgcaagatcgatatttttacgttggatttctgcttcgagtggttcgcctcgtttaagcagggcattaccgccgagagcgataaccagtgttggtttgttttccatgatctcttccttagataccgtcacgatgcaaagggcaactcatgcaacgtgcgccgccacgtccgcggcctaattcatcaccggggatgggtaaaacggtgatgcctgctttgtcatatttttcgttagtccagatgttgcgctcgtagcccactaccactcccggccgaagcgtgagcacattgttagcgtcattccactgttcgcgttctgcctcaaaggcatcaccccccgtggtgattaaacgtacctggtcaataccgagggctttttcgatagcatggaggagtgtgctttcttgagtacgtttcaggccgccgtgaccgtcaggtgttagcgtccagcaattaacatccgggcgcacaacttcgggataaaccgagaaggtgtcgatatcgatatgagtcataacggtgtcaagatgcatacaggagcggtgtttaggcagctcaacagcgattacccgttcagcctgacgatgtttaaacaatgcctgagcaagaaactcgattccttgtggcgtggtgcgttcagacatgccgatcaacacggccccccgaccaatcaccagcacatcaccaccttctaacgtggcgtggtcataattaatattctcgtcgccgaaatatttaataaattcgccgccagcaaattgtggatgccagcgataaatagcgcgtagattattggtttcacgttggcgagcaggttttgccattggattaatcgatacaccgttataaatccagcatgaggtatcacgcgtaaataaatgattcggtaacggcttcataatgaaatcattaatatcgtgggtatcaaccaccatatttttaattgaggcgggaatttcactataagtcagcccaccacttaaatgacgagcaaggtcccggtgtgacatctctgcaagccaggtgcgaacgtcagtagcaaacgtagggccgagtcggtaatctgatatttgtgtttccagtaaccagcttttggcttccgggatatccaatgtttgtgttagtaaatcagtgagtaacagaacttctatcccttgctggcgcagcgtattggcgaaaatatcatgctcttcacctgcccgctcaacggacaatacatcgtcaaataacaactcctggcaattggatggtgttagacgtttcagactgagatttgggcgatgcaacataacgctgcgtagttgtccaatttcagaaccaacataatgcttttccatcattattcctttaacactttttcaaaaataaagaggagatggctgcaaacaaattaaatgcttgtagtcaggtctgttcagtaattttcagatgcaatgattcagtttatttcttccagaaaatgtgacgactttcacaccggcggtgatattaataatcgaagttaataatatttgatgcggttctgataaatgataaagaaacaaaatacgataatgcattaatacgcaaatatacgcagagttattcttcgttgttaattgattgttttatttttcaggaaatgcctttaagtataatgcattgatatttatgtatattttaatattcattgcatatctatgcgaaaggataaggtgattatttttcacagcactattttcacgggataactatgacagcacgggcattaaaagctaagaaaatgaactgtgatctgactgagagttttcttttaacatatgcaataacaagatattaggaccaaaatacatagctaagttataagatttatgcagcaaaactgcatacaaaattactcctgcttaacatcagtacaacatctccagcaataaacatgcgcaagggcaaaacctgatgatttttctatggtgagaggtggctttttttcgtataaggaaagaagtgaaacattgttttaataaaggaagatattatgattgttggcaacatccatcacttacaatcctggctgccggaagaacttcgcgaagcaattgagtacatcaaatcacatgtcagcgatgagacagcaaaaggtaagcacgctattgacggcgaccgcctgttttatctgatttctgaggatacgactgaaccaggtgaactgcgtcgtgctgagtatcatgctcgttatctcgatatccagattgtattaaaagggcaggaagggatgacatttagcacgcaaccagcaggcgtaccagagactgactggctggcagataaagatattgcttttatcgggcaggggatcgatgaaaaaacagtgattcttaatgaaggggattttgtcgttttctatcctggcgaagttcacaaaccgctttgtgcggtgggagcccccgctcaggtacggaaagcagtagttaagctattaaaatcgtaagtgatcactgccgggggcgacctgtgccgccgcccggcaaaacgttattttgctaatgtagcgaccataacagcttttatggtgtgcatccggttttctgcctggtcaaagacaatacttgccggagattcaaagacttcatcggtgacttccattccaccatacagaccgaattctgcggccatttttttacccagcgtggtttgctcatcatgaaatgcaggcagacagtggaggaacttaacctgcgaattaccggtcagggccatcattttgctattcacctgatagtcacgcagcagggcaatacgctccgcccatttctctttgggctcacccatcgatacccagacatcggtatagataaagtctgcacctttaaccccagaggcgatatcttccgtcaaggtgattttacccccgtgtttttgtgccagagcactgcattcggcgaccagcgcagcttccggccagcatgcctgtggcgcgaccagacgcaaatccagaccggtaagcgccgcagcttcgagcatcgaattgcccatgttgttacgcgcgtcacctgcatagaccagcgtcatttcgttgaatgctttgccgggcaaatgctcctgcatggtgaggagatccgccagcagctgcgtggggtggaactcattggtcaggccgttccatactggcacgccagcgtattccgccagtgtttcgacaatctcctgaccatagccgcgatactgaataccgtcatacatgcgaccaagcacgcgggcagtgtctttaatcgactctttgtgaccaatctggctgccgcttgggccgagataagtaacgcgagcaccctggtcatatgcggcaacttcgaaagagcatcgggtacgggtcgagtctttttcgaagatgagcgcgatgtttttgccagtgagtctggcttcttctttaccgcttttcttatcggctttcagcttcgcggctaactgcaacaagctgttgagttcagctggcgtgaaatcgagtaatttcaggaaatgcttatgataaaacccggacatagatccctcctgtggctaacgccttaatgaattaaaattcaatctatatggatgattattcatttgcaagtctaaagcataaatctttgtcacaaaggtggaggcaatgtcagtggtgtgtgacaataagagtatcggcaggacattaagaggaatgagccatggcaaacccggaacaactggaagaacagcgtgaagaaacacgtttgattattgaagaattactggaagatggcagcgatccggacgcgctgtacaccatcgaacaccatctttccgcagacgatctggaaaccctggaaaaagcagcagttgaagcgtttaaactcggttacgaagtgaccgatccagaagagctggaagttgaagatggtgacatcgtgatttgctgcgacatcctcagcgagtgtgcgttgaatgccgacctgatcgatgcccaggttgaacaactgatgacgctggcggagaaatttgacgttgagtacgacggttggggcacttactttgaagatcctaacggcgatgacggcgacgatgaagattttgtcgatgaagacgatgacggtattcgtcactaattaagcgttgacgacaaaggctgcgttacctgatgcgctacgcatttcaggcccaggtagttcctgcaacctggtgaatttgtagcccggataaggcatttacgtcacatccagcatactcaaaaagtacgtggttaatgttcgaatgcccgcgagtctaagctcgcgggcattttttcaaagtttgcgtagcatccgtacttcacaatcgacatgacccgtgcagccaagcgcatagtcgatatgctcaaagcccaaatgctcataaagcgcaatggcttcctttaaaaaagcggtcgtttccagatagcagcgtttgaaacccatttctcgcgcctgctccattgccattaaggccagtttttttgccagccctttgccgcggatagccggaagaaaatacatcttttgcagttcgcaaatgtctgactcactcccggttaatggcgcaatcccaccgccgccgaccacttcaccctcgtactcaaccacccaatatgcgtggccaggctgactatacacttgatacagctcgtcaaggttcggatcggcgacggtgtagcctttatcagcggtaagaccgtattcggcggatacctgacgaatgacgtgggcgatagcaggattatcggcgacggtaagtttgcgcaaacggagtgcgggagaagcgacaacattcatagcatagctcaatttcaaatgtatgatttatagctcactttaataccaccctcgcttaggtggtgcaagaagaagataaatcagaaaatattacgcatatctctctgagataaagcgtattctaggcgaaccagtatcaattgactggaattattatcggtatgaatggaatttattttagggatatagttcatgaatgatgtaaacatcgggaaagataattctcggcactcgtttgttttcacaggcaaaggtggtgagtattttcttatttgtcttgtgaattttttactgacaattattactctgggaatatatggaccgtgggcattgataaaatgccgtcgttatatttatcaacatgtgacactcaaggggcaaccatttagttataagggaacaggtggtgccatttttgttagcatgttacttattgtggtggtttatcttctcagtatttcttgttttgcaggtcaacactttgcgctcggtttattcctgtttgctctcttgatctgcggtattccttgtatggcagtgaagagtctgcagtatcaggcgaacatgacctcactgaatgacattcgctttggctttaactgctcaatgatgcgtgcatggtggggttatgctaggactgcctgttctgttggcgttagttttttggttcgcactgtatcttattgcgcaagtgacgacatcgataggaggcttattctttaacttagtcgcattaagtttgctttctgccatcgggctaggtgttgtccatggtataacctatagtaaatggatgccattgctgggtaataatgcaacttttggcattcataagttttctattcaggtaaacgtaaaagaatgcattaaaggttgcatgctcgcaatattaaccatggttcctttcatcattgtgattggtattatgatcgcaccagtattccagcagttaatgatgatgaccatgttgggtgggtctgatgctggcagtgagtttgtattacaatattacccgcagattatggcttcttatttcctgtattttgtcgcgatccttgtttttgccagttatctctatgtcacgttacgcaatctgtttttgaataatctgacgctggcaaatgggacaattcgttttcattcatctgttaccgcgatcggtatgcttctgcgcatgttggcggtattaatggggtcctcaattacctgtggtctggcttatccctggctgaaaatgtggatggttagctggattgctaacaatacccatgtccagggcgaccttgattcgctggagttaaccaatgatgacaaaccgcaggatagcggttcgttaatgtggatatctcgcggtattatgccgtatgttccgtttatctaaataaaaaggccggagcatgctccggccttcgttttcactatgagtattacagcgcggcgataacagcctgctgttcaatcagcttcgctttcgcttctgcgtagccttccagcttctcacgctctttcgcgatgaccgcttccggtgcgcgggcgacaaagccttcgttcgccagcttgttctcaatacggctgatttcgccttcgatcttcgctacttctttcgccagacgtgccagctcatcttctttgttgatgaggcctgccatcgggatcagcagttctgcgccgtcgacgatctttgtaacggaaaccggacctttatcatcagcaggcagcacggtgatgctttccagacgcgccagcgtttgcaggaagccgcggttttcatttacgcgacgttctgcatccgcgctgcaaccacgcagcagcagctccagcggtttacccggcgcgatgttcatttctgcacggatgttacgtacagcaacgatcgcctgtttcagccactcggtgtcggccagtgccgcttcatcaacctgagacgcatcgtactgcgggaacggctgcagcatgatggtgtcggcagtgataccgcaaagtactttcacacgctgccagatggtttcggtgatgaacggaatgatcggatgcgcgaggcgcagcagaccttccagtacagtcaccagcgtatggcgagtaccgcgcagttcggcttctgttccaccgttcattaccggcttggtcagctccagataccagtcacagaactggttccaggtgaattcatacagaatgcctgcggcgatatcgaagcggaagctgtccagcgcttcgcggtacgctttgatggtctggttgaactccgccagaatccagcgatccgccagcgacagcgtcatttcaccgccgttgaagccgcaatcctgaccttccgtgttcatcagcacaaaacggctggcgttccacagcttgttacagaagttacggtagccttccagacgcttcatatcccagttgatgtcacgaccggtagaagccagcgctgccagggtgaagcgcagcgcgtcagtaccgtgcggctcaatgccgttcgggaactgcttctcggtgcgcttacggattttgtccgccagctgcggctgcatcatattgccggtacgtttttccagcagttccggcagcgaaataccgtcaaccatatccagtgggtcaatcacgttacctttggatttggacatcttctggccttcgtcatcacgaatcaggccggtcatgtaaacggtgtggaacggcacctgcggtttgccattttcatctttgatgaagtgcatggtcatcatgatcatgcgggcaatccagaagaagatgatgtcgaagccggataccatcacgctggttgggtggaactggcgcagtgcgtcggtgttttccggccagccgagcgtggagaaggtccacagcgcggaggagaaccaggtgtcgagaacgtcttcatcctgacgcagcgcaacatcagcaccgaggttattttctttacgcacttcgtcttcgttgcggccaacataaacattacccgcttcgtcataccatgccgggatacggtgaccccaccatagctgacgagagatacaccagtcctgaatatcgcgcatccaggagaaatacatgttttcgtactgcttcggtacgaactgaatgtcgccgttctcaaccgcttcaaccgctggtttcgccagtacatcggcacgaacgtaccactggtcggtcagcatcggttcgataaccacgccgccacggtcgccgtaaggaacggtcaggtcgtgcggtttgatctcttccagcaggccgagtgcgtcaaccgcagcaacgaccgccttacgtgcagcaaaacgctccagtttctggaactctgccgggatttcgctggaataaatgtcagattcgttacctttggtatcgaacacctgggcgctttcacggatatcgccgtcaaaggtcaggatgttgatcatcggcagggcgtgacgtttaccgacttcatagtcgttaaagtcgtgcgctggggtgatcttcacgcagccggtgcctttttccatgtcggcgtgttcgtcgccaacgatcggaatacgacggttaaccagcggcagaatgacatatttgccaatcagatctttataacgcggatcttccgggttaacggccacgccagtatcgcccagcagggtttccggacgggtagtcgcaaccaccagataatctttaccgtctgcggttttcgcgccgtcagccagcggatagcggatgtgccacatcgaacctttcgattcgcggttttccacttccaggtcggagatagcggtgcgcagtttcgggtcccagtttaccaggcgtttgccacggtaaatcaggtcttctttatacagacgaacgaaaacttctttcaccgcattggacaggccttcgtccatcgtgaagcgttcacgctcccagtcgacggagttgccgagacggcgcatctgacgggtaatcgtgccgccggattccgctttccattcccagattttgtcgatgaaagcttcgcggccgtagtcgtgacgggttttaccttcttctgcggcaatcttgcgctcaacgaccatctgggtagcgatcccggcgtggtcagtaccgacctgccacagggtgtttttgccctgcatgcgctgatagcggatcatggtatccatgatggtttgctggaaggcgtgacccatatgcaaactgccggtgacgttcggcggcgggatcatgatgcagaaactttcctggctttcatcgccattaggcttaaagtagccctgcttttcccagtgctcgtaaagcggctgttcgatatcttgtgggttatatgtcttttccattatttccaggttgccgtattcaggttgaaaccagccacgcggtaggctttatagcgttcgcgcgccagttgtttcagagaatcttcataaggaacgaagtctaccacttctgtgaaagcggtggcaaaatctgcaaagcatgttcgcagactaatcaatatatcgcgcgggctgctgctgcgtttttgcggccaggcgatctccaccggcgcaccgccacgcggtccttctcccgctaaattatgcggaacaaagctttctgccggacgcgcccacagggcttcatccagccggtaagcctgcttttcatcttcacaggcgatgagcacgcgcttaccgctgcgccaacgttctgcggcaatttcacacaccagttgctcaacggcgcttaagccatcgacggtggtgtcattgtccagaaggtagaacgtcgcgtttttcataaatggggcttcttgtggtggatttaaatacgcatcaggtatacaccgcagcgcctgatgcgacgctgttgtgtcttatcaggcctacgagttcagtgctgtgtgtaggtcggataaggcgctcacgccgcatccgacaataacagcattgcctgatgcgacgctgttgtgtcttatcaggcctacgagttcggtgctgtgtaggtcggataaggcgttcatgccgcatccgacaataacagcattgcctgatgcgacgcttgcgcgtcttatcaggcctacgagttcagtgctgtgtaggtcggataaggcgttcacgccgcatccggcaataacagccttgcctgacgcaattactcttcgccgttaaacccagcgcggttcaacaggaactgtgccagcaacgctaccggacgaccggttgcgccttttgctttaccagaacgccaggcggttccggcgatatccaggtgcgcccagttgtacttacgggtaaagcgcgacaggaagcaacctgcggtaatcgccccaccaggacgaccgccaatgttcgccatatcggcaaaattggactccagctgttcctgatactcgtcacccagcggtaagcgccatgcgcggtcaccggattgttcagacgcggcaatcagttcatgggccagcggattatggttcgccatcagaccggtaatgtgatgacccagcgcgatcacgcaggcaccggtcagcgtcgccacgtcaatcaccgcttccggctcaaaacgctcaacgtaagttaacacgtcgcacagtaccaggcggccttcagcgtcagtattcagcacttcaacggtttgaccggacatggtggttaacacatcgcccggacgataggctcgtccgccaggcatgttttcgcagcctgccaacacgccgataacgttaatcggcagttgtagctccgcgaccatacgcatcacaccgtaaaccgctgccgcaccgcacatatcgtacttcatctcatccatgccttctgaaggcttgatcgagataccgccggagtcgaaggttaaacctttacccaccagcacgattgggcgtgcatcttccgacgcgttgcctttgtactcaatcaccgacatcagcgattcgttctgcgaaccctgaccgaccgccagataggaatgcatccccagctctttcatctgctgttcgccgataacgcgggtgataacattcttgctgtagctgtcagccagctggcgcgcttgtgaagcgaggtaagcggcgttacagatattcggtggcatattgccgagatctttcgcggctttaatcccggcggcaatcgccagaccgtgctggatcgcgcgctcaccgctggtcagttcacggcgggtcggcacgttgaacaccattttacgcagcggacgacgcggttcgctcttgttcgttttcagctgatcgaaactgtagagcgtttcttttgccgtctcgacagcctgacgcactttccagtagttgttacggcctttaacgtgcagttcagtcagaaagcagaccgcttccattgagccagtatcattcagcgtattaatggttttctgaataacctgcttgtactgacgctcatccagctcacgttctttgccgcaaccaataaggagaattcgctcggaaagtacattcggaacatggtgcagcaacaatgtctgccccggttttccttccagttcgccccgacgtagcagggcgctgatgtacccatcgctgattttatcgagctgttctgcaatcggagaaaggcgacgtggttcgaagacgcccacgacgatgcaggcactccgctgtttctccgggctaccgctttttacactaaactccatgcactacgctcctgaatcttaaagacaacggcggtggctacagatagaattgcaagctttcgtaactcatgtccgctgttgcgatgacttcgtgttaatcttaacgttattacggcattggcacgtcagaacaaaatctgagaggtgaatccgttgagtataattatcttagcgacgatttcgacgactcaagagaataaatgacgtttaagccatgaaacaagctaaaatcctgcaaaagacgagtttttacgggcgtatttaaagtgataatcataagatatctggtgcgggagacgctcaaaagccagctggcgatactcttcatcttgcttttgatcttcttctgtcaaaagttagtgaggatcctcggcgcagcggttgacggcgatattccggcgaatctggtgctctcccttctcgggttgggcgtgccggaaatggcgcagcttatcctgccattaagcctgttcctcgggctgctgatgacgctgggcaaactgtataccgaaagtgaaattacggtaatgcatgcctgcggcctgagcaaagcggttctggtgaaagcggcaatgatccttgcggtattcacggcaatcgtcgcggcggttaacgtgatgtgggcgggaccgtggtcatcgcgtcatcaggatgaagtgttagcagaagcgaaagcgaaccctggcatggcggcgctggcgcaagggcaattccagcaagcgactaatggcagctcggtgctgttcatcgaaagcgttgacggcagcgatttcaaagatgtgttcctcgcacaaattcgaccaaaaggtaatgcacgtccttctgtggtggtggccgattccggacatttaacccagctgcgcgacggctcccaggtcgtcactctcaaccagggaacgcgcttcgaaggcactgcactgttacgtgatttccgcattacggatttccaggattatcaggcgatcattggtcaccaggcggtggcgctcgacccgaacgataccgaccagatggacatgtgcacattgtggaacactgacaccgatcgtgctcgcgcagaactgaactggcgtatcacgttggtattcaccgtgtttatgatggcacttatggtcgtaccgctgagcgtggttaacccacgtcagggacgcgtactgtcgatgctgccagccatgctgctgtatctacttttcttcctgatccagacctccctgaaatcgaacggcggtaaaggtaagctggacccgacgctgtggatgtggaccgttaacctgatttatctggctttggcgattgttctcaacctttgggacaccgtgccggtccgccgcctgcgcgccagtttttcgcgtaaaggagcggtgtgatgcaaccttttggcgtacttgaccgctatatcggtaaaactattttcaccaccatcatgatgacgctgttcatgctggtgtcgctgtcgggcattatcaaatttgtcgatcagttgaaaaaagccgggcaggggagttacgacgcgttaggcgcaggaatgtataccttgctgagcgtgccgaaagatgtgcaaatcttcttcccgatggcggctctgcttggggcgttgcttggtcttgggatgctggcgcagcgcagcgaactggtggtgatgcaggcttctggttttacccgtatgcaggtggcgctgtcggtgatgaaaaccgccattccgctggtcttgctgacgatggcgattggcgaatgggtcgcgccgcagggcgagcagatggcgcgtaactaccgtgcgcaggcgatgtacggcggctcgttgctctctacccagcaaggcttatgggcgaaagatggcaacaacttcgtctacattgagcgggttaaaggtgacgaagagttaggtggcatcagcatttatgcctttaacgaaaatcgtcgtctgcaatccgtacgctatgccgctactgcgaagtttgacccggaacataaagtctggcgtctgtcgcaggttgatgaatctgatctgaccaatccgaaacagatcaccggttcgcagacggtgagcggcacctggaaaaccaacctcacgccagacaaactgggcgtggtggcgctggacccggatgcactctcaatcagcggtttgcacaactacgtgaagtatctgaagtcgagcggtcaggatgccggacgttatcagctcaatatgtggagcaaaatcttccagccgctatccgtggcggtgatgatgctgatggcgctgtcgttcatctttggcccactgcgtagcgtaccgatgggcgtgcgtgtggtcaccggtatcagcttcggttttgtcttctacgtactggaccagatcttcggcccgctgacgttggtttacggcatcccgccgattatcggcgcactgttgccaagcgccagcttcttcttaatcagcctgtggctgttaatgagaaaatcgtaaccgaatgaaccaagcaagggagcgaaagctccctttcacattgttgataaagtcaaatacgagttcgatcggtcccctcgcccctttggggagagggttagggtgagggggacagatcgcgcctgacttaccttcttctccctcccagcaaactccccaacatccacattgttgataaagtcaaatacgagttcgatcggtcccctcgcccctttggggagagggttagggtgagggggacagatcgcgcctgacttaccttcttctccctcccagcaaactccccaacatcccgcgtacaatctgattcgtcacctggcgagcggcgcttttggccattgtctgcaccacaccatctttcttcccgccgcgtggtccggtagtgccgaacaaaatatccttcaatccaccaagaatgccgtcatctaccgctatctctttccctttcgctggaggattattttgctgttcaatactcgcctgtacgcctttttgcaacatctcataggcggattcccggtccacgtcatcctcgtacttgccatacaccggggagtggttaatcaagccattgcgctcatcttccgtcaccggtcccatccgcgaacaaggcgcaatcaccatcgcccgttccaccacagaaggacttccttttgcatcgagaaacgagattaacgcctcgccggtccccagttcctggattgccttttcggtatcaaacgccggattggcccgcatggtttgcgccgcagcttttaccgctttctgatcttttggcgtaaaagcccgcaaagcgtgctgaacgcgattaccgagctggccgagcacattatccggaatatcagacgggttttgcgaaacgaaccagacgcccacgccttttgagcgaataagccttatcacctgctcaatcttatccagcagtacctgcggtgcatcgttaaacagcagatgtgcttcgtcgaagaaaaacaccagttttggcttctccagatcgcccgcttccggcaattgttcatacaactctgaaatcatccacagcaggctggcggcgtacagtttcggcatctgataaagcttctcggcgctgaggatattaataacgcctttaccgttggcatcggtgcgcatcaagtctttgatatccagcatcggctcaccaaagaagtgtgctgcgccttgctgttccagcgacaacagcccgcgctggatggcaccaaccgatgcgctactgatatttccgtactgattctggaaagatttggcgttatcgccgatgtactgggtaatcgcccgcagatctttaaagtcgagcagtaacagcccctgatcgtcagcaattcggaagatgatattcagcacgccagattgcacatcgttgagattcaacagccgcgccagcaacagcggccccagatccgaaaccgtcgcccgcaccggatggcctttctcgccaaagatatcccacaccaccaccggattagcatgcggttgccagtcatttacgccgatatttttaagccttgcgagcagtttttccgacgccgttcctgcctgcgcgataccggtcagatcgcctttcacatcggccataaacaccggcacgccgatttccgatagagactccgccagtttttgcagcgtgacagttttacccgtccccgttgcgccagtaatcagcccgtgacggttagccattcccggcagtaaaaacagttctgtgtccggcgtgcgggcaattaacaggggttcgctcatgagatttcctccagtttcctgcctggagtataggcaacggctgtgcactcttcaccgctaaattcagcagattgcgagacgccttccaaagagatttaagtgccgggcgacaggctcccggcaaagggatcagaagtcggctttcaggaccacgcggtagcgcgctttaccatcgcgtacatgctggatggcgtcgttaattttcgacatcgggaacagttcggtggtcggcgcaaccttgctgcgggcggcaaaacgcatcagcttacgcagctcataaggcgtgccggtagcagaaccagagatgctgcggtcgcccgcaattaacgtaaaggccggaacagacagcggcgtgagaaccgcaccgaccgtatggaaattaccgccataggtcagcgcctcaaaataaggctgccagtcgaggctgacgttcacagtattgataatgagatcaaactgccccgacagggctttcagtgcctgcggatcgcggctattcaccactttatcggtacccatcgccagtacttcctgctctttcgccggattagaactaaaggccgtcacctcgcatcccattgcgtgcagaagttttatagcgatatgccccagcccgccaataccaattaccccaacgcggctggtagcagtgatatggtgcatcaacagtggtttaaagaccgtgataccgccgcacaacagcggcccggcggactcgatatcaatattttctggcagtggaatcacccattgccagtccgcacgcaacttctcggcaaagccaccgcgattcataatcgtcggcaccgcaccttgctcgcagttgatctgattaccgctaatacaggtgtcgcagtgaccacagctacgcgccgtccagccaatcccgacacgctgaccgacctgcaaacctttatcctgcgcggcgctcccgagtgccaccacgcgcccaatcacctcatgcccggcaaccagcggatattgtgaaaatccccattcgttatcgatcatcgacagatcggaatgacaaatcccgcagtaatccacctgcacttcaacatcttgtggcttcagctcaccgggatcgtactcataaacttccagttcgccgcccgcttcttttgcggcatagctttttatcatcgacatttttgggtccttctctggtgttgtttgggaagtgtagagcatggcagggcggggtgcctggagtgtgacaaaggttacatatcgctgagtgtaatgctgaaaatttcagcacttagcgaggtgggtgcaagctggcgcttgcatggtggcgtgcgacaggtataatccacaacgttttccgcatacctcttcagtgccgaagtggcgaaatcggtagacgcagttgattcaaaatcaaccgtagaaatacgtgccggttcgagtccggccttcggcaccaagggaatggacaaggacatcccccatgaataaactcccaagatgcgggtgtgagcacctgaaagtgatcgttaattcgggatgtcagtgagtccgctatatccggcagtgtctggttaaaaaagacagatattgcttcatgttcgttcattaatttccacattctttctatcggattcaggtttggactgtaagggggaaggtaatgcagcctgatatttaccacttccgcccagtctttcactaactgtgaacggtggtaacctgctccatccagaataacgtggattttctggttataatcaggataaacctttcgtatctcattgaaaaaacgggatacattatattcattaatggttttatattcgcagattagcggtgacgtcagtgctttcagattcagcgcccccatgatattcaggcgtgtgcggctgcctgttgtttttactgcttttttctggcctttgcgtatttagtggcctgagtcggatggactccatcaataaaaagaatcggctcatcacccacagttgttttcagttccttataatattcaatgaattgcctttgtcgctcacctttcgcgccaaaactgcaaaattgcttctacaaatctgtcagaaataatcccccgacgggctgccgcgctgaaatgactgcttcgcagtgacgtcgtccagttctccgctgaccggtacgctgaaccgaaatatcccgtgcttaaatcgtccggatcttcatcaggcgcgttcgtcagtcctctttcaccttgttgctggaagtcgacgaaaataatattggctaaaacattattttgataattgccataaatagcttcatacgcatgagggaaattttctttccagtaccaggtggtatcgccgcaaaaccacggcgcggcagtaatattattaagctgagaatggaattgttttagatccctacgaaaggcttcaaccatatgattaaagtgttgagggtgtgacgcgtagtcactggtcattaagtcaaattcgccttgcatccagcatacgccgaggaatttgttatgcggattttttgccagtgcggctcgcgttctgctgactaaatcctggtagagcggggtatccgttccccaacgacaagcatcatggctggctccgtgccgttctgaatatgtcccctcgctgcccgcggtaaaagccgatccgccacggcaacacgggacgatgagaatccctgcattatcaggaatgaagggcagtaatttccgtgcaatatgcagtgcctggccaacggtgccgtactgtgtttgatgattcgttgccagaggatggtgataaccctgcatatcctgaacatcgtgtgggcagtgagtcagtggaataatgtcgttaaagtgacatggcgggcctccgggatgcgtatgcgtaaatctcgctaattgtttgattctgggatgaggcgcatcttccctgtccggtaatggcagtccttcgccatacgccatggcattagactgaccagcaacggtaagaacatagtaataattgggcgatattattgcgttcatataattttcgcgtaattgaaatgacaaattgatagcagggcccctttaccggggccctgaagcgttagttttgtactgtgactttattatccttcacagagatcaaaactgaatccgtcaccgctttgccgcctgcagattcaccgccaataatcaatagactattattccagggcaatgatactccgtaggcccgaccttgcgataattcacccgatttatcccatttcccgttatgccaaagatgaatatcagtgctatatgattttttcaggccttcatgcgcatagttcttaccgttctggtaattttctcgtgaacctttgaatccggcccctccggcaaatataagagaatcattgcttatccccgcaaaaccgccagcgacgccatctggtgatgagacgggagcaagcctattccattttaaattatcaccggtgaaatcaagttcaaatacggcatccgttcgcaatccgggtttggcttcgccattaataagccaggttttatcacctttattcacaaccgccgcaccagccgttccgtaccagggagattcgccagcgtaactccattgctgggttgagggatcaaaagacaacagaaacttattgaagaaataatcttctgcttttttgtcaaaatagtgagcgttgattttatctatagcggttgaatcttttccagcctcgttgagatcttcaaaatagccattgaagatattctggttaacaccgccagtaacataagctttgccgttgtgtacaaaagtcacatggcccgccatgcccattggcgcgtgcgacatcaatttaacccagctattggttttggggttgtatttgtgtacgtcattaaatacctgagtcaagcccttgctatttttgccaatgccgccaaacacatacagatcaccatcaataaatgccgaggttgcttgatctcttggtccaccagggaatgcagctaacgctgtccattttttatctttggcctgtgtatccagcttgtaccatgccgtacctgcgctacctaaaccaatgtagacagtgtcgttatcaattgctccggtaccacttttaaatggcacaggagtttccggtaatacagacgcgtttgcggcaaatgaagccatcatgatagcaagcgccgttattgttttattcattgtgactgtctcctgtctactacagtttaaatgacacaccaatgcgataactgttttccgataaattatctctgccgttgtaaacaccctgacggtcaaggtagtcatattctatgtatggcgtaatatcgggcgtcatatggtattgtagaacaaatgcattttccgtcgcccatttcttatggtttgcatagcgataatcgttctgtttgctgtatagcgtcgtttgccatgcgaaggtgaaatcactattaatatggtaagtgacatatccatcccaacgatgaacgttatcacgagacatatcaccggataagtcttgttgtcggtaagctttccagtcgtaacgatagcgaatgccaaaattaagatcttttgtcgcgtcccaggacagttttacgtagggtccgtaacgtgtgccgttgctgctaaaatgcgttaacattcccgggcgtaccgtccattgatcatcaagtttaattgcgtaattaacttcaacctgaacatcattgagtgcggcattttcctttttattatcatgaatggtattccaggtattactttccatgcttgcccaccatccattttgccatccctcactgactttgagtcgagtctcataggcgtggcttccactacgatatccaccacgtacgtccagtgtcgcagcctgagaaattaatggggacgaaaagcacagtaataatacgccagaaagtattttagcctttttcataaatttcactcatttgtaggatacagaaagcaatacaaagcccgcataaacaattagcatttatgttgtgtaatattttttgccaggcttatagtgtctttggcaacgggtagctgtattttatattttttgtataatgtctcctgtgaaaaatctctttccacattatttaaataaacagagagccagattaaatacctgagtataaaatctctgctgatgtttaattgatttgaattttcgtaagctatatcgcttactcaatccattttacccagagtcataaaatagagtgtctgttgatctcattttcatattcctttcagactgaagtgcgttttcatcacccgatgagaaagaactgaagtgatgtttgccatagattgcgagatgcccagtttcattgactatcgtggtgcacctttatacctgttataccagatcaaaaatcacgcaatccatacaacaaaaccagatttgcaattcgtgtcacaaaatatgtcgatctttttctaagaggcagatgccatgtgaagccagacgaacacttgcggtggtcttcaaaaactaaagatttttcttttaactatatgttttataaataatttatttagaatataaacaaagaaagctttgcaagctaactcagtgagcttggtgaaaataagtgtttacccgccatcaggctgagcataattctcatcatgaaatatgtttcttggtttgtggcttgtaactggtcactcctgatgtcgatctggagaggcttgttgatgctggtgttttcaggatgatgtttcaattagtttgtttgccatatcgcccggcgagtagctgtgattgaggagggtttaagtcgtagtgaccaaagccatatttaccaacggatgtagatgaaaaagcgtcgcctgcgttcccccatatctccaggaaatacacagtctgaaaaaggaatgtaacaatctcatgacctaaactgacgaaccagccaggaataatcgctagggacctaagaattagcttgataatagccactaagaaattactgcgttccatgaaatagccattttgtggtaaatggagttgactaataatgtcatatgtgagacggctagttgaacgaatattaaattttgctgaattttttatgttgattttacttgttacagaacatatcacatgatatatagataagattagttgcattaatgatgagggttattattagattcgtatccgattgataaatatataaaggtacatagcatgcaagagcatggcgtttgtatggcaaagttattataagtaactatcgctactccatttaagttcactcagaagaactggtccacttacgttagttattaagcaaacgttcgcttttataaacataatcaggataaaaatgttggattattgctaacccagcacagctagtgcgcgtctgtaattctaagggaaaaacgatgaagaataaggctgataacaaaaaaaggaacttcctgacccatagtgaaatcgaatcactccttaaagcagcaaataccgggcctcatgcagcacgtaattattgtctgactttgctttgttttattcatggtttccgggcgagtgaaatttgtcgattgaggatttcggatattgatcttaaggcaaagtgtatatatatccatcgattaaaaaaaggcttttcaacaacgcatccgctattgaacaaagaagttcaggctttaaaaaactggttgagtatccgtacttcgtacccgcatgctgagagcgagtgggtatttttatctcgtaagggaaatccgctttctcggcaacagttttaccatattatctcgacttccggtggtaatgccgggttgtcactggagattcatccgcacatgttacgccattcgtgtggttttgctttggcgaatatgggaatagatacgcgacttatccaggattatcttgggcatcgcaatattcgtcatactgtctggtataccgccagcaatgcagggcgtttttacggcatctgggatagagccagaggacgacagcgtcacgctgttttatagagatagttgagataccagggatggtgtttaaaactacattattcttacgatatatcaaaaatgattaaccatttattaattgatgttattgtaagtgtgattattaattttcataataaacattaagttaaccatatccatacaaaatacaatggtttatgttcttcaaaataaataaacaaaatcattcataaatttacacatcacttaaattctcctgtttccgcacttttttctttattttttaagcaactggaagttaatccactgcaatctattgttatattgaatcaaatcaatgaaaatagatgttgtcacatcagtgatattttatttttgtatgatatttaatgtaattgactgatagccacatcactccgtgtgtggttatctttttatctattgggctaattttgaccgattgaggtttcctataggtattcattcaaatatatctcagttaggagtactactattgtgagtaaacgtcgttatcttaccggtaaagaagttcaggccatgatgcaggcggtttgttacggggcaacgggagccagagattattgtcttattctgttggcatatcggcatgggatgcgtattagtgaactgcttgatctgcattatcaggaccttgaccttaatgaaggtagaataaatattcgccgactgaagaacggattttctaccgttcacccgttacgttttgatgagcgtgaagccgtggaacgctggacccaggaacgtgctaactggaaaggcgctgaccggactgacgctatatttatttctcgccgcgggagtcggctttctcgccagcaggcctatcgcattattcgcgatgccggtattgaagctggaaccgtaacgcagactcatcctcatatgttaaggcatgcttgcggttatgaactggcggagcgtggtgcagatactcgtttaattcaggattatctcgggcatcgaaatattcgccatactgtgcgttataccgccagtaatgctgctcgttttgccggattatgggaaagaaataatctcataaacgaaaaattaaaaagagaagaggtttgatttaacttattgataataaagttaaaaaacaaataaatacaagacaattggggccaaactgtccatatcataaataagttacgtattttttctcaagcataaaaatattaaaaaacgacaaaaagcatctaactgtttgatatgtaaattatttctattgtaaattaatttcacatcacctccgctatatgtaaagctaacgtttctgtggctcgacgcatcttcctcattcttctctccaaaaaccacctcatgcaatataaacatctataaataaagataacaatagaatattaagccaacaaataaactgaaaaagtttgtccgcgatgctttcctctatgagtcaaaatggccccaaatgtttcatcttttgggggaaaactgtgcagtgttggcagtcaaactcgttgacaaaacaaagtgtacagaacgactgcccatgtcgatttagaaatagtttttttaaaggaaagcagcatgaaaattaaaactctggcaatcgttgttctgtcggctctgtccctcagttccgcagcggctctggccgatactacgacggtaaatggtgggaccgttcactttaaaggggaagttgttaacgccgcttgcgcagttgatgcaggctctgttgatcaaaccgttcagttaggccaggttcgtaccgctagcctgaagcaggctggagcaaccagctctgccgttggttttaacattcagctgaatgattgcgataccactgttgccacaaaagccgctgttgccttcttaggtacggcaattgatgctacgcatactgatgtactggctctgcagagttcagctgcgggtagcgcaacaaacgttggtgtgcagatcctggacagaacgggtgctgcgctggcgctggacggtgcgacatttagttcagaaacaaccctgaataacggaaccaacaccattccgttccaggcgcgttattttgcaaccggtgccgcaaccccgggtgctgctaatgcggatgcgaccttcaaggttcagtatcaataacctacccaggttcagggacgtcattacgggcagggatgcccacccttgtgtgataaaaataacgatgaaaaggaagagattatttctattagcgtcgttgctgccaatgtttgctctggccggaaataaatggaataccacgctgcccggcggaaatatgcaatttcagggcgtcattattgcggaaacttgccggattgaagctggtgataaacaaatgacggtcaatatggggcaaatcagcagtaaccggtttcacgcggtaggggaagatagcgcaccggtgccttttgttattcatttacgggaatgtagcacggtggtgagtgaacgtgtgggtgtggcgtttcacggtgtcgcggatggtaaaaatccggatgtgctttccgtgggagaggggccagggatagccaccaatattggcgtagcgttgtttgatgatgaaggaaacctcgtaccgattaatcgtcctccagcaaactggaaacggctttactcaggctctacttcgctacatttcatcgccaaatatcgtgctaccgggcgtcgggttactggcggcatcgccaatgcacaggcctggttctctttaacctatcagtaattgttcagcagataatgtgataacaggaacaggacagtgagtaataaaaacgtcaatgtaaggaaatcgcaggaaataacattctgcttgctggcaggtatcctgatgttcatggcaatgatggttgccggacgcgctgaagcgggagtggccttaggtgcgactcgcgtaatttatccggcagggcaaaaacaagtgcaacttgccgtgacaaataatgatgaaaatagcacctatttaattcaatcatgggtggaaaatgccgatggtgtaaaggatggtcgttttatcgtgacgcctcctctgtttgcgatgaagggaaaaaaagagaataccttgcgtattcttgatgcaacaaataaccaattgccacaggaccgggaaagtttattctggatgaacgttaaagcgattccgtcaatggataaatcaaaattgactgagaatacgctacagctcgcaattatcagccgcattaaactgtactatcgtccggctaaattagcgttgccacccgatcaggccgcagaaaaattaagatttcgtcgtagcgcgaattctctgacgctgattaacccgacaccctattacctgacggtaacagagttgaatgccggaacccgggttcttgaaaatgcattggtgcctccaatgggcgaaagcacggttaaattgccttctgatgcaggaagcaatattacttaccgaacaataaatgattatggcgcacttacccccaaaatgacgggcgtaatggaataacgcagggggaatttttcgcctgaataaaaagaattgactgccgggtgattttaaaccggaggaataatgtcatatctgaatttaagactttaccagcgaaacacacaatgcttgcatattcgtaagcatcgtttggctggtttttttgtccggctctttgttgcctgtgcttttgccgcacaggcacctttgtcatctgccgaactctattttaacccgcgctttttagcggatgatccccaggctgtggctgatttatcgcgttttgaaaatggacaagaattaccgccagggacgtatcgcgtcgatatctatttgaataatggttatatggcaacgcgtgatgtcacatttaatacgggcgacagtgaacaagggattgttccctgcctgacacgcgcgcaactcgccagtatggggctgaatatggcttctgtcgccggtatgaatctgctggcggatgatgcctgtgtgccattaaccacaatggtccaggacgctactgcgcatttagatgttggtcagcagcgactcaacctgacgatccctcaggcatttatgagtaatcgcgcgcgtggttatattcctcctgagttatgggatcccggtattaatgccggattgctcaattataatttcagcggaaatagtgtacagaatcggattgggggtaacagccattatgcatatttaaacctacagagtgggttaaatattggtgcgtggcgtttacgcgacaataccacctggagttataacagtagcgacagatcatcaggtagcaaaaataaatggcagcatatcaatacctggcttgagcgagacataataccgttacgttcccggctgacgctgggtgatggttatactcagggcgatattttcgatggtattaactttcgcggcgcacaattggcctcagatgacaatatgttacccgatagtcaaagaggatttgccccggtgatccacggtattgctcgtggtactgcacaggtcactattaaacaaaatgggtatgacatttataatagtacggtgccaccggggccttttaccatcaacgatatctatgccgcaggtaatagtggtgacttgcaggtaacgatcaaagaggctgacggcagcacgcagatttttaccgtaccctattcgtcagtcccgcttttgcaacgtgaagggcatactcgttattccattacggcaggagaataccgtagtggaaatgcgcaacaggaaaaaccccgctttttccagagtacattactccacggccttccggctggctggacaatatatggtggaacgcaactggcggatcgttatcgtgcttttaatttcggtatcgggaaaaacatgggggcgctgggtgctctgtctgtggatatgacgcaggctaattccacacttcccgatgacagtcagcatgacggacaatcggtgcgttttctctataacaaatcgctcaatgagtcaggcacgaatattcagttagtgggttaccgttattcgaccagcggatattttaatttcgctgatacaacatacagtcgaatgaatggctacaacatcgaaacacaggatggtgttattcaggttaagccgaaattcaccgactattacaacctcgcttataacaaacgcgggaaattacaactcaccgttactcagcaactcgggcgctcatcaacactgtatttgagtggtagccatcaaacttattggggaacgagtaatgtcgatgagcaattccaggctggattaaatactgcgttcgaagatatcaactggacgctcagctatagcctgacgaaaaacgcctggcaaaaaggacgggatcagatgttagcgcttaacgtcaatattcctttcagccactggctgcgttctgacagtaaatctcagtggcgacatgccagtgccagctacagcatgtcacacgatctcaacggtcggatgaccaatctggctggtgtatacggtacgttgctggaagacaacaacctcagctatagcgtgcaaaccggctatgccgggggaggcgatggaaatagcggaagtacaggctacgccacgctgaattatcgcggtggttacggcaatgccaatatcggttacagccatagcgatgatattaagcagctctattacggagtcagcggtggggtactggctcatgccaatggcgtaacgctggggcagccgttaaacgatacggtggtacttgttaaagcgcctggcgcaaaagatgcaaaagtcgaaaaccagacgggggtgcgtaccgactggcgcggttatgccgtgctgccttatgccaccgaatatcgggaaaacagagtggcgctggataccaataccctggctgataacgtcgatttagataacgcggtcgctaacgttgttcccactcgtggggcgatcgtgcgagcagagtttaaagcgcgcgttgggataaaactgctcatgacgctaacccacaataataagccgctgccgtttggggcgatggtgacatcagagagtagccagagtagcggcattgttgcggataatggtcaggtttacctcagcggaatgcctttagcgggaaaagttcaggtgaaatggggagaagaggaaaatgctcactgtatcgccaattatcaactgccaccagagagtcagcagcagttattaacccagctatcagctgaatgtcgttaagggggcgtgatgagaaacaaacctttttatcttctgtgcgcttttttgtggctggcggtaagtcgcgttttggctgcggatagcacgattactatccgcggctatgtcagagataacggctgtagtgtggccgctgaatcaaccaattttactgttgatttgatggaaaacgcggcgaagcaatttaacgacattggcgcgacgactcctgtcgttccatttcgtattttgctgtcaccctgtggtaatgccgtttctgccgtaaaagttgggtttaccggtgttgcagatagccacaatgccaacctgcttgcacttgaaaatacggtgtcagcggcttcgggactgggaatacagcttctgaatgagcagcaaaatcaaataccccttaatgctccatcgtccgcgctttcgtggacgaccctgacgccgggtaaaccaaatacgctgaatttttacgcccggctaatggcgacacaggtgcctgtcactgcggggcatatcaatgccacggctaccttcactcttgaatatcagtaactggagatgctcatgaaatggcgcaaacgtgggtatttattggcggcaatattggcgctcgcaagtgcgacgatacaggcagccgatgtcaccatcacggtgaacggtaaggtcgtcgccaaaccgtgcacggtttccaccaccaatgccacggttgatctcggcgatctttattctttcagtctgatgtctgccggggcggcatcggcctggcatgatgttgcgcttgagttgactaattgtccggtgggaacgtcgagggtcactgccagcttcagcggggcagccgacagtaccggatattataaaaaccaggggaccgcgcaaaacatccagttagagctacaggatgacagtggcaacacattgaatactggcgcaaccaaaacagttcaggtggatgattcctcacaatcagcgcacttcccgttacaggtcagagcattgacggtaaatggcggagccactcagggaaccattcaggcagtgattagcatcacctatacctacagctgaacccgaagagataattgtcatgaaacgagttattaccctgtttgctgtactgctgatgggctggtcggtaaatgcctggtcattcgcctgtaaaaccgccaatggtaccgctattcctattggcggtggcagcgctaatgtttatgtaaaccttgcgcctgccgtgaatgtggggcaaaacctggtcgtagatctttcgacgcaaatcttttgccataacgattatccggaaaccattacagactatgtcacactgcaacgaggctcggcttatggcggcgtgttatctaatttttccgggaccgtaaaatatagtggcagtagctatccatttccgactaccagcgaaacgccgcgggttgtttataattcgagaacggataagccgtggccggtggcgctttatttgacgcctgtgagcagtgcgggtggggtggcgattaaagctggctcattaattgccgtgcttattttgcgacagaccaacaactataacagcgatgatttccagtttgtgtggaatatttacgccaataatgatgtggtggtgcctactggcggctgcgatgtttctgctcatgatgtcaccgttactctgccggactaccctggttcagtgccaattcctcttaccgtttattgtgcgaaaagccaaaacctggggtattacctctccggcacaaccgcagatgcgggcaactcgattttcaccaataccgcgtcgttttcaccagcgcagggcgtcggcgtacagttgacgcgcaacggtacgattattccagcgaataacacggtatcgttaggagcagtagggacttcggcggtaagtctgggattaacggcaaattacgcacgtaccggagggcaggtgactgcagggaatgtgcaatcgattattggcgtgacttttgtttatcaataaagaaatcacagaacattgctaatgcaggtacgcaatattgcctgaagctaaaaaactgcacgttagccctttgtaggccagataagacgcgccagcgtcgcatctggcataaacaaagtgcactttgccgacaatccgaacagagcctgccaatggcaggctcaggtgctcttttacgctaccatgctgataatcaacacaataatcagcccaaccacggagttgaccagctccagcagaccccaggttttcaacgtgtcttttactgacaggtcaaagtaacctttgaacaaccagaaagatgcatcgttaatgtgggtgagggtgttggaacccgcagccgtcgccagtaccagcagcgccggattcacgccaaccagctgaccagttgctggatcaaggattgcagcactgataatcccggcggcggtcatcgccgaaacgacaccctgacccgtcgccagacgaattagcacagtgatcagccatgccataatgtagggcgagatattgccgtgggacatcaacatgccgatggtgtcgccaatgccggtgtcgatgatagtttgcttcaacacgccacccgcaccgatgatcagaatcaccattgcaatgcttttcaccgcactttcaaaagcgttcatcacccactgcatgtcatgaccacgtgcggtgccaaagagtacgaatgcaaccaccatcgcaataaacattgcaatcggcgaggaaccgataaagttaaccacttcccaggcaggggtatcttttaccagccagatattggcgatggtggtagagatcataatgatcgccgggatcagcggcaccagaatcgaaacgccgaaagagggcagattgttcatatctaccggttgatctgctttcaggaatgatggcgttgggcgctcaagattgccgaggaacttcggcaggatcagacctgcgcagattacacttgggatcgtcaccagtacgccatagatataaaccatccccatatctgcgccataagcattcaccagcgccacaggacccggctgcggtgggaacagtgaatgtgcggtagtggcagctgctactgccgggatcgccagtttcaggaacggaattttagcagcgccacaggacccggctgcggtgggaacagtgaatgtgcggtagtggcagctgctactgccgggatcgccagtttcaggaacggaattttagcttcggcggcaatgacaataaccagcggcgctaacatgataaaggccacttcatagaacatcgccagaccaaaaatcaggccgatgataatcaccgacagctgtacatagcgcagaccgagacgcgccagcagcgtatgtgctatctggtgagccgcgccggagtcgaccatcaatttaccgatgaccgcaccgaacaccacgatgatagccagttcccccagcgtgttgccgaagcccgctttcatggtgtgcagcagcgacatcaaatccatgcccgccagcatcccgacggacagcgccgccaccaacaaagccaccattgaattgattttgaacttcaaattcagtaccagcatcagaccaatgccgaataccacccagagaatgttaagcacatgcataacgttttaccttacctggttgaaccgttgttattttgggcgacatgttatgtaaattggtcaaccattgttgcgatgaatgtcacatcctctgatcaataaccatcgattaccctttgctgcaatttgcagcaacaaccaggagagtgaaattcttgtgatgtggttaaccaattttagaattcgggttgacatgtattaccaaaaggtagaacttatacgccatctcatccgatgcaacgccacggctgcggtctggttgttcatccggatacctaaacaactccagggttccgcgtctctttgctgtggaacccactatgtgaaagaggaaaaatcatggaacagacctggcgctggtacggcccaaacgatccggtttctttagctgatgtccgtcaggcgggcgcaactggcgtggttaccgcgctgcaccatatcccgaacggcgaagtatggtccgttgaagagatcctcaaacgcaaggctatcgttgaagatgcaggcctggtgtggtctgtcgtagaaagcgtgccaattcacgaagatatcaaaacccacactggcaactatgagcagtggatcgctaactatcagcagactctgcgcaacctggcgcagtgcggtattcgcaccgtgtgctacaacttcatgccggtgctcgactggacccgtactgacctcgaatacgtgctgccagacggctccaaagctctgcgcttcgaccagatcgaattcgctgcattcgaaatgcatatcctgaaacgcccaggtgcggaagcggattacaccgaagaagaaattgctcaggcagctgaacgcttcgccactatgagcgacgaagacaaagcgcgtctgacccgtaacatcattgccggtctgccgggcgcggaagaagggtacaccctcgaccagttccgtaagcacctggagctgtacaaagatatcgacaaagccaaactgcgcgaaaactttgccgtcttcctgaaggcgattattccggttgccgaagaagttggcgtgcgtatggctgttcacccggacgatccgccgcgcccaatcctcggcctgccgcgcattgtttctaccattgaagatatgcagtggatggttgataccgtaaatagcatggcgaacggtttcaccatgtgcaccggttcctacggcgtgcgtgctgacaacgatctggttgatatgatcaagcagttcggtccgcgtatttacttcacccatctgcgctccaccatgcgtgaagataacccgaaaaccttccacgaagcggcgcacctgaacggtgacgttgatatgtacgaagtggtgaaagcgattgttgaagaagaacaccgtcgtaaagcggaaggcaaagaagacctgatcccgatgcgtccggaccacggtcatcagatgctggacgacctgaagaagaaaaccaacccaggttactccgcaattggtcgtctgaaaggcctggccgaagttcgcggtgtcgaactggcgatccagcgcgctttctttagccgttaatatccaccggcatggctgcgcgccgtgccggttccttcttccttgccgtcactctctgaagacggattctggagtttacgatgactactattgttgacagcaatctgccggttgcccgcccgtcatgggatcattctcgtctggaatcacgcattgtgcatctcggttgcggggcgtttcaccgtgcgcaccaggcgctgtacacccatcatctgctggaaagcaccgacagcgactggggtatctgcgaagttaacctgatgccaggcaacgaccgcgtgctgatcgaaaacctgaaaaaacagcaactgctgtacaccgtggcggaaaaaggcgcggaaagcaccgagctgaaaattatcggttcgatgaaagaagcgctgcacccggaaatcgacggctgcgaaggtattctcaacgcgatggcgcgtccgcaaacggcgattgtctctctgacggtcacggaaaaaggctactgcgctgatgcggcaagcggtcaactggatctcaataacccgctgatcaagcacgatctggaaaacccgactgcgccgaagtccgcgattggttacatcgtcgaagccctgcgtctgcgtcgtgaaaaagggctgaaagcgtttacggtgatgtcctgcgataacgtgcgtgaaaacggtcatgtggcgaaggtcgcggtactggggctggctcaggcgcgtgacccgcagctggcggcatggattgaagagaacgtcaccttcccgtgcaccatggttgaccgcatcgttccggcggcgacgccagaaaccttacaggaaattgctgaccagctgggtgtttatgacccgtgcgccattgcctgcgaaccgttccgtcagtgggtgattgaagataacttcgttaatggtcgtccggactgggataaagtaggcgcacagttcgttgcagacgttgtgccgttcgaaatgatgaagctgcgtatgctgaacggcagccactctttcctggcatacctcggttacctcggcggctatgaaactattgccgacaccatgactaacccggattatcgcaaagcggcctttgccctgatgatgcaggaacaagcgccaacgctgtcgatgccggaaggtacggacctgaacgcctatgcgacgctgctgatcgagcgtttcagcaacccgtctctgcgtcaccgtacctggcagattgcgatggacggcagccagaagttaccgcagcgtctgctggatccggtgcgtctgcacctgcaaaacggcggcagctggcgtcacctggcgctgggcgtggctggctggatgcgttacacccagggcgtggatgagcagggtaatgccattgacgtggtcgacccgatgctggccgagttccagaagattaacgcgcagtatcagggcgcagaccgcgtgaaagcgctgctgggcctgagcggtatttttgccgatgatctgccgcagaatgccgactttgttggcgcggtgacggcggcatatcagcagctgtgcgaacgcggtgcgcgcgagtgtgtggctgcgctgtaactaactgattaccctacagacttactggtcaatcaaactgatatttggttgaccagttttcgtttttttgcccacctgtacgtgccaacttccagtgctaatggtatagtttgagattaacgggtgccgtaaaattgcccgttgtaggccggataaggcgttcacgccgcatccggcaaaaatttgattaaccgcacctaacggacacaacaccatgaaatctgccacctctgcgcaaagaccttaccaggaagtcggggcgatgatccgcgatctgatcataaagacgccgtacaatcctggcgaacggttgccgccggagcgtgaaattgcagaaatgcttgatgtcacgcggacggtggtacgtgaagcgctgatcatgctggagatcaaagggctggtggaagtgcgccggggtgccggtatctatgttcttgatagctcaggcagccacaacacagacagtccggatgccaacgtttgcaatgatgcgggtccttttgagctgttgcaggcgcgacagcttcttgagagcaacatcgccgagtttgccgccctgcaggctacccgcgaagatatcgtcaaaatgcgtcaggcattgcaactggaagagcgtgaactggcttccagtgcgccgggcagcagcgaaagcggtgacatgcagttccatctcgctattgccgaagcaacgcataacagcatgctggtggagctgttccgtcagtcctggcagtggcgggaaaacaatccaatgtggatccagttgcacagccatctggatgacagcctgtatcgcaaagagtggttgggcgatcacaaacagatcctcgccgcgttaatcaaaaaagatgcccgagcggcgaagctggcaatgtggcagcatctggaaaacgttaagcaacgcctgctggaattctcgaacgttgacgatatttatagaacatcgccagaccaaaaatcaggccgatgataatcaccgacagctgtacatagcgcagaccgagacgcgccagcagcgtatgtgctatctggtgagccgcgccggagtcgaccatcaatttaccgatgaccgcaccgaacaccacgatgatagccagttcccccagcgtgttgccgaagcccgctttcatggtgtgcagcagcgacatcaaatccatgcccgccagcatcccgacggacagcgccgccaccaacaaagccaccattgaattgattttgaacttcaaattcagtaccagcatcagaccaatgccgaataccacccagagaatgttaagcacatgcataacgttttaccttacctggttgaaccgttgttattttgggcgacatgttatgtaaattggtcaaccattgttgcgatgaatgtcacatcctctgatcaataaccatcgattaccctttgctgcaatttgcagcaacaaccaggagagtgaaattcttgtgatgtggttaaccaattttagaattcgggttgacatgtattaccaaaaggtagaacttatacgccatctcatccgatgcaacgccacggctgcggtctggttgttcatccggatacctaaacaactccagggttccgcgtctctttgctgtggaacccactatgtgaaagaggaaaaatcatggaacagacctggcgctggtacggcccaaacgatccggtttctttagctgatgtccgtcaggcgggcgcaactggcgtggttaccgcgctgcaccatatcccgaacggcgaagtatggtccgttgaagagatcctcaaacgcaaggctatcgttgaagatgcaggcctggtgtggtctgtcgtagaaagcgtgccaattcacgaagatatcaaaacccacactggcaactatgagcagtggatcgctaactatcagcagactctgcgcaacctggcgcagtgcggtattcgcaccgtgtgctacaacttcatgccggtgctcgactggacccgtactgacctcgaatacgtgctgccagacggctccaaagctctgcgcttcgaccagatcgaattcgctgcattcgaaatgcatatcctgaaacgcccaggtgcggaagcggattacaccgaagaagaaattgctcaggcagctgaacgcttcgccactatgagcgacgaagacaaagcgcgtctgacccgtaacatcattgccggtctgccgggcgcggaagaagggtacaccctcgaccagttccgtaagcacctggagctgtacaaagatatcgacaaagccaaactgcgcgaaaactttgccgtcttcctgaaggcgattattccggttgccgaagaagttggcgtgcgtatggctgttcacccggacgatccgccgcgcccaatcctcggcctgccgcgcattgtttctaccattgaagatatgcagtggatggttgataccgtaaatagcatggcgaacggtttcaccatgtgcaccggttcctacggcgtgcgtgctgacaacgatctggttgatatgatcaagcagttcggtccgcgtatttacttcacccatctgcgctccaccatgcgtgaagataacccgaaaaccttccacgaagcggcgcacctgaacggtgacgttgatatgtacgaagtggtgaaagcgattgttgaagaagaacaccgtcgtaaagcggaaggcaaagaagacctgatcccgatgcgtccggaccacggtcatcagatgctggacgacctgaagaagaaaaccaacccaggttactccgcaattggtcgtctgaaaggcctggccgaagttcgcggtgtcgaactggcgatccagcgcgctttctttagccgttaatatccaccggcatggctgcgcgccgtgccggttccttcttccttgccgtcactctctgaagacggattctggagtttacgatgactactattgttgacagcaatctgccggttgcccgcccgtcatgggatcattctcgtctggaatcacgcattgtgcatctcggttgcggggcgtttcaccgtgcgcaccaggcgctgtacacccatcatctgctggaaagcaccgacagcgactggggtatctgcgaagttaacctgatgccaggcaacgaccgcgtgctgatcgaaaacctgaaaaaacagcaactgctgtacaccgtggcggaaaaaggcgcggaaagcaccgagctgaaaattatcggttcgatgaaagaagcgctgcacccggaaatcgacggctgcgaaggtattctcaacgcgatggcgcgtccgcaaacggcgattgtctctctgacggtcacggaaaaaggctactgcgctgatgcggcaagcggtcaactggatctcaataacccgctgatcaagcacgatctggaaaacccgactgcgccgaagtccgcgattggttacatcgtcgaagccctgcgtctgcgtcgtgaaaaagggctgaaagcgtttacggtgatgtcctgcgataacgtgcgtgaaaacggtcatgtggcgaaggtcgcggtactggggctggctcaggcgcgtgacccgcagctggcggcatggattgaagagaacgtcaccttcccgtgcaccatggttgaccgcatcgttccggcggcgacgccagaaaccttacaggaaattgctgaccagctgggtgtttatgacccgtgcgccattgcctgcgaaccgttccgtcagtgggtgattgaagataacttcgttaatggtcgtccggactgggataaagtaggcgcacagttcgttgcagacgttgtgccgttcgaaatgatgaagctgcgtatgctgaacggcagccactctttcctggcatacctcggttacctcggcggctatgaaactattgccgacaccatgactaacccggattatcgcaaagcggcctttgccctgatgatgcaggaacaagcgccaacgctgtcgatgccggaaggtacggacctgaacgcctatgcgacgctgctgatcgagcgtttcagcaacccgtctctgcgtcaccgtacctggcagattgcgatggacggcagccagaagttaccgcagcgtctgctggatccggtgcgtctgcacctgcaaaacggcggcagctggcgtcacctggcgctgggcgtggctggctggatgcgttacacccagggcgtggatgagcagggtaatgccattgacgtggtcgacccgatgctggccgagttccagaagattaacgcgcagtatcagggcgcagaccgcgtgaaagcgctgctgggcctgagcggtatttttgccgatgatctgccgcagaatgccgactttgttggcgcggtgacggcggcatatcagcagctgtgcgaacgcggtgcgcgcgagtgtgtggctgcgctgtaactaactgattaccctacagacttactggtcaatcaaactgatatttggttgaccagttttcgtttttttgcccacctgtacgtgccaacttccagtgctaatggtatagtttgagattaacgggtgccgtaaaattgcccgttgtaggccggataaggcgttcacgccgcatccggcaaaaatttgattaaccgcacctaacggacacaacaccatgaaatctgccacctctgcgcaaagaccttaccaggaagtcggggcgatgatccgcgatctgatcataaagacgccgtacaatcctggcgaacggttgccgccggagcgtgaaattgcagaaatgcttgatgtcacgcggacggtggtacgtgaagcgctgatcatgctggagatcaaagggctggtggaagtgcgccggggtgccggtatctatgttcttgatagctcaggcagccacaacacagacagtccggatgccaacgtttgcaatgatgcgggtccttttgagctgttgcaggcgcgacagcttcttgagagcaacatcgccgagtttgccgccctgcaggctacccgcgaagatatcgtcaaaatgcgtcaggcattgcaactggaagagcgtgaactggcttccagtgcgccgggcagcagcgaaagcggtgacatgcagttccatctcgctattgccgaagcaacgcataacagcatgctggtggagctgttccgtcagtcctggcagtggcgggaaaacaatccaatgtggatccagttgcacagccatctggatgacagcctgtatcgcaaagagtggttgggcgatcacaaacagatcctcgccgcgttaatcaaaaaagatgcccgagcggcgaagctggcaatgtggcagcatctggaaaacgttaagcaacgcctgctggaattctatttattttgatggctatctgtttgattcatggccgctggataaagtcgacgcctgacttattataataagcgcaagggtaaacgttccttgcgctttcttaaattaagaagtcgcaatgagtattactttgtaaattgcaggggattgtttagctatctgtataacctgaatgttagtactcattcttcctggtagttatttaccaatataattccattcaccattttttaattcaaacagttctggaagagatgacggttgcagagtcatacgtttgagtggtgcattttcatcacccgggataggcttctataccaattattgggtcattacccaactcaatattagcattaagtaatgcggcaagggcgaatccggaagaatttgctacccctgttaccgtcattatctgatcaatatagatatcaatccttggctgctcattggtccatctttttgcctgagaagctggaagggttgaaatatatcctatcgtggttccggcataaccaggaacattgcaaccagggcctaatgttatttcatgaactgtatagtcctcaacaggatcgaaagggcctttcataaataaatttagccgtaatccttttgctaactctgtggcagcatgcgcctttttacatataccaccatatatttcgtctaaagctgaggtgattttcaagtttcgatagagcatacgtcctgttgttgtaataccattgaattctctgcatgtttctgtcacataattaaatggccaggactctttactaatatcaagttttctaatttcgacaacgctttttccatcgtaattatggttattgccacgagcaagaggcggaagatagatattttccgtatccatgcgtgcacgttcatgtttacgtgttaactcactgtcgacttttggatgatgaaggaagtgattatctgtaataatttaactctgaagggcattgcttaatggcatagacataatagttacctttatgagtatttcactgatgcttagaaaaatagataaatttttctgtagtaaaaagagaagtaaacaaatgacatgcatgtttctgttgtagtgatatcaactctacacagtgatattaaatggtgggaaacactctaaagtatcaaaaaacgctcatttaaaattatttgcatgcaatttaaaagcatatcttattactaattggaatttgatgttgctatattgatgtctatattaataatgcctgtgaatggtatttttgatgtatttgatatgttatcaatttatattatttacaaactaattgttttaaataatacatagctgattatgcggaaataaataatttcccaccggaattaagtagcggtggtgacaagtattttcatctacgtaactattcggaatattcagaatatactagcggtttttttttgagtttgatgatttttatcaaatcatgacttttttcctgaaaagtcagtagatattcataggcaagtaaggttttatactttgctgacaggattcaggcctgtctcagactgacatggatgtaatgaacaaaagggaatggctatggaaaatgagcatcaatacagtggtgcccggtgttcagggcaagccgcatatgttgctaaacgtcaggagtgcgcaaaatgatgcgccaatcacttcaggctgttttacctgaaatttcaggcaataaaacgtcaccgctgcgtaaatcagtatgcagcgatctcctcactctttttaattctcctcattcggcattaccgtcattacttgtttcaggcatgcccgagtggcaagtgcataacccgagcgacaaacatctccagagctggtattgccgtcagctgcgttctgcactgttatttcatgagccacggattgcggcgttgcaggttaatttgaaagaagcgtactgccacactctggcgatcagccttgagataatgctgtatcacgacgatgaatcgctaacgtttgatctggtctgggataatggcggttggcgcagtgcgacgctggagaatgtcagctaagcacaatctccagctcgcgcagttcacgccagaagcgttcggcaactggattcatgcgggtattcatccggtatgcataggcctgaatcgggatcaccagttcgtcccgattcagtacaacgagctgcccgctgcgaatttcttgttggatggcgtattccggtagccaggcaatcccacagccgtcgagggcaacctgctttaaaagctcgctcatcgaagagacaaaaaaggtgctgaaacttaactcactgtggcgcgtcagggtgcgattaatcaatcgccccatgtaggagttgcggctgtaattcagtaacggaaagtgtggctgcgcgaggttaaaaagtgcttctccgtgttcgtcactggcgcaaacggggaacaattgagattcaaataagcgaatgtggtcaaacggcgcttccagcaaatcttcgtcgtgaaaggaaaaaatacagtcactttgcccttcacgcagtttatcgaccgcttcatcgacatcaatagcttcaattgcccaggtaaagagcggcggcatctggctgataatggacggtaacagcccgagggaaagagagtgtgcagcggctattttaattttgcgttgcgcgtaatcgctgccaccacggagttctgcaaggttgctctctaactgttgcaacagatggcggatctgcgaatggaatattttaccttgttccgagagttgcagcggcgtcacctggcggttaaacaattcaacgccaatcgcctgttccagcgcacggatgcggcggctgaatgccggttgcgagacgttgcgactgactgctgcctgggaaaaattgcggcatttttccagggtcagaaaatcataaagccatttagtttcaatattatgcaaaaccgcaccacagtcatccattacgttttactctgtcagccgcccttgcgggcattctacgtccattcgggcggctgacaaccgtttatgccgtttcaaacgttcctttcacgcaggctttgccgtctttgaccatcagcttgccgcgagcgtatacctgctcaatgcgtaattctggcgtcatgaccagtaagtctgcgtcattgcctggcagaatttcgcctttcccgctcaggttaaggaaaccggctacgctactggtgagcgggcgcagggcatcgctgatactgaaatcataatctttgaccagcacctgcacggtttccagcaacgtttcaaaaccggcaacaccgatatgggttaaattcccttcgtcatcgaagaacggctggctaccgttgccgtcggagctgagggtgacgcgtgccagcggaatacccgcctgaacggcgcgggcaataccttcggcaggggcgactggttcgtcaatgctgctggtgatatcgatggtgccgcctttgcgcgcgaactccagcgcctgctcaaacaacggaacgttgcggttaacgtgggtcggcagcaacttgctaatcggcacatcgcagttttccagcaggtcatagacaggctgtaacgcctttttgctgtcgcccatgtggaacacggtgacgccaggtttaccgccgagcaaaccgccaacgcgggattccgccgccatattagccaggtgataaacgtccggtgcggcagaacggtgatcagagatggcgcatttcacgccaatcacgcgatcgataatcgccacgtctttttccacggaacccgtaatagtgcgggaagggacatgataagcgccggtcagcatccaggcgctgatgccttcttcattgagcgcacgggtcttggcgagcagggattccgggtggcgagagatagagtcggtgcccagcagaccaaccactgacgtgacgcctgcttccgtcagacgacttaacgccacttccggcgtgcgcgtcgtgggacctgcttcgccgccaccgccaatcaaatggacgtgttgatcaataaaacctgggcagaggatctgcccgctgagatcgacaaccgtgcagtccggtacaatgtcagaagggatattactggcaacggcgataattttgccgttagcgacgaggacatcgcaaattccccgatcttccggcgcatacaaatgcgctccctgcagcagggtaaaaccggctgcggtataatcaatcatggtaactccttgttaaacaataagctgcataacccagatcgacagcaatgcgttaatcacgcagaccgtaatgatatgcgggtaatatttggcattcacttcggctgtccccaggcagcgaccgacattttgcaccgggttgcccattaaatacatcgcgggcagtaaaacggtgacatcgtgaccggttaatgcgccagcggttgccagactggcggcaacaccgactgcgccacccatactcattaatgcggctaaaaggacggttgccgcttcaccgggtaatccccacagcgccattacgggttcacagatatgccccacccagtcgagcaggccggtaattttcagcgcctgaatgatgacaaacgccatcaccacgtttggcagcaggttggtcgtggcgatagtaaagccacggcgcgcaccatcgataaacatatccatgacgtttttgcggacctgagttgtcatgcttgcgctccttgcgttgggttgcgacgttcttcgaagttaagccagacgcgcaaaatgttggctccgacaaatttaaacaccaggatgactgctaaaggtacgattacggacgtgcccagaaaggcaaacaccgcgacgccggaagagaagtagttggtgataatggcgctaccgctggtttgatatgcggcgaaaatcactttatcgcgttcggtaatttcaccttcctgcgccagctctttggtcatacctgcggcggcatcggtgttttgcaggttagcgatcagcgccagcgagcagatccctggaatgcccaacaacggttttagcactggcgtcattaactgctgcgcggcgcgtaatccgccaagaccatcggtaattgaaataatccccagagagagaatgactgacggtgccagctccagcgcaaagagaaagccatctttagcccccgcgccacccgcgccgcgaaacgaggtggtggctccgttcgcaccaggcagttgcccaaacgatccgttcagaacggaaaaatcaaaaacgcgccaccaactgtctgtcccggaaaaaacaccggaaaaaaagattatggtgagaaaaaaagccagataccctttaatgcccactttttctgtcgccagctccccggctacagcatccccttgttgtgtcataacaatccccattgtttttttgtgtttgtgtgttgcttgagccaggaaaattcctggagctgaaaaaccttatcagccatgtgggtatggggaaaatgcaagtatgtttctgactatgcgttttttgcatagcggtaaaattacgctgtgtggaaaaggttctacgcaggattgagttgcagaaaattcataaacccagtgacaatgacatcagtaaataaaaaacagataatccagggacgaaaacgcgatggcaaagtacaacgaaaaagagctggcggatacgagcaagtttttaagttttgtcctccgacacaaaccggaggcgattggtatcgtactggaccgtgaaggatgggcggatatcgataagctcatactttgtgcccaaaaagcgggcaagcggttaacccgtgcattgctggataccgtggttgccaccagcgataaaaagcgttttagttattccagtgatggtaggtgcatccgcgcggttcaggggcattcgacttcgcaggtcgctatttcctttgccgaaaaaacaccgccacagtttctctaccacggtacggcaagccgtttccttgacgagataaaaaaacaggggctgattgcaggtgagcgtcactacgtacatctctctgctgatgaagcaacggcacgcaaagtgggagcaagacacggatcgccggttattttaaccgtcaaagcacaggaaatggcgaaacgaggcctccctttctggcaagcggaaaacggggtctggctgacatcaacggttgcggtcgaatttcttgagtggtaagggaaacactcctcatgaagtgaccacttgcagcttaaataattgtactgtgctgataagcgcagcaataaacaacgccgccgcgccgcagagagtggcgccggcaagcgccgatgttccattgccgagcatactggtcagcgccgggccgaggatttgtccaatgccgtaaatgagcgtcacaaagcctaaaagattgagatttcccggtacgctcagttggcgggcgatagtcatcaccagagatgtcgtgcccataaaggtaccgccaaaaccaagactgctgatgataagcaagagaggcgagtcgctggcgagagtaagcagcacacagatagcctgcaccagcaaattcgccgtcaggcagggcaaagccccccaacgttttgctgcccatagccagccaaagcaaccaggcacaattgataagccgactaacgtccagagatgggcggttaacaatggtgagcctgcatctttcgccatgagcggcaggtaagtcgcgacgatgatataaccaaatcccgccaggccgtacagaatagccagtaaccaccagctcattatctgttgctccgtttttgccaatggcattggtgtgatggcgtgttttttcgagggcattaaaagcgtaagtgcaatcagcatcatgccagaaagcgccccggcgccttgccataacgtttgcgaggagaggtcaaaatgcaggcctgccagaacatattcattgcccagtgcgatgccaatgccaacgccagaaaacaaagctgccagcacaaaaggatggcgcgtgtgctgcataatcagcatcgaaccaaaaatcagcataccggcgctggcgacacccgccaggacgcgaatcaataacaccagaataaatggcagcaaccatgccattgcgaggatcaacaacccgctcgccagggcagaagccaacagaaatgggcgcaggcgcgatggctggtgaaatgcgccaaacgaaaatagcagactgccagccagataccccgcatagttgccgctggcaatccacgagagctggctaaatgaaaacgatccttccgccatcatgacgggcaacataggcgtataaaggaagcggcctaaacccatacctaaggtcagaaccagcatcccgaaaagcgcggtgctgaaagaaaagcgttctacgggatgcgagggcgaaggcatgtttaaccttgtttgtcatttttgttgttaacaagttaataacaaaaaggtgaaacatgccagcctgttaatgcgatgattgaggggtaaagcgataaaaacgatttggttcgctaacgatataaatattacctgaggcatccatcgcaaccccttcggcctgtttgatgttatgcgacaaacctcgactgcctttggttagtgacatttcacctataacctcgccagccagcgttacttcctggagtgcgcgagattcatgagacagcaccagaagcgtatttttttgttggttaaattctgcgccggacacatcatctaaagtaaattgccgttgtagtgccttgtctttgctgatgtgcaattcattgctacttaacagcccgttaactttgtagacctcaatcgggtttttctctttaaaaaaccagaaagtgtgatcctggcgagaataggccaatccttcaaaaccgcaattggttggggattcctgcagcgggatttttatttttttgaggatttttacttccgagtttggggtcagtgaaatcacataaatggcataatcgcgctcatcgctaatgacaaactgattatcgccaatgtattcgatcgtctcgagatccttaacaaaatccagaggaattgtgcggatcaaatcgccattggtggtcatttcaacaatggcggcaggtttgttgatagtgctaaaaagagtattgctttgtgccgaccaggtcagcgaagagatattattcgttatgcctgcaatttctttgccgtcaatggtggcgtggtaattctgaaatgatgctgcatgattgcttttacgggcgcaagattgcacgaagaaagtacacactgccacaatgacaaaaagaatcacaataacgaagatgcgtttacttaacgaaatactttttgtcacggtaatccctttaaggcaaatcaataagatatcgagaagtatacgtagcgatcttaatgaatccttaacgcggagaaatcccgtaatgtgcaatgcagcgccagccaccatcctgctgacaataaactgattccgtatgcccagggatcacccattgaatttcctcgccaggcggacaggtcagccaaatgcataacccgcagccgccgcgtaaatcacggggaatatcgctgacgcgaaaagtcatgcccgctgcctgcaacgccttgcgggtttgtatgacgccgaccgtggagtgaaataaaaacagatactctttcatgcgcgttttctctgccgctgaccgatcaccgccgcgccaattgcaccagcgaattgcgcatcagggtgagtttgtaccggcattcccagatggctttccagcatgtgggtaaacctttgacagtggctaacgccaccagtaaacagaatcggcgcttcacaggagagacgagcaatgaaattggcgctccgccgcgccatcgcgttaatcactccggcgagaatcgcttctggcgctacgcccgcagagcgcaggctgatcacttctgattcagcaaacactgtgcacatactcgtgatggcgtgcggtatgacattttcggtaatgctgtcgagttgctcgacgctggtgccaagcgtgcgcgagatcacctccaggaaacgcccggtgcccgccgcgcatttgtcattcatcaggaaatcgcacaggttaccgtcatcatcaagctgaatcactttgctgtcctgaccaccgatgtcgattactgcgcgcgttgctggcgcaagaaaccgtgcgcccagcccgtgacaggagatttccgtcacctgtttatcggcaaaatccaccagttgccgtccgtagccggtgagcgtcagaaacggcgttgtttctaacccttcgcgcagagtttcccaggcttcagtaattgctgttgccgggcgaaagggtgttggaacgaggaaacggcgcgtaatcacgccgtctgccagtaagatccctttggtggcggttgagccggaatcaatgccaatcgaatatgccactgccactccttacagcatctcaataaaggccgcgacacgggtgctgagctgcccgatatctgaggtggagtagtctgtttcaatagcgatataaggaatgttgtgctgatgacgcacatgacgtttaatcgccagcgattccaccgcgtaggtatggcacgcctgcaaaatcacatcaactacgccatcgacctgatattcttcaaccatctggctgagcatttgcaggcgctgatcgttcggcgaaacacaggagcagccaatcgccagatatttatccgccagcgcgtcgtagacatcgcccgtttctgccacgcattgctcggtcgctttcgccccggtgcagttttcataaccgacaacccagccgccattctcttcaattgcgcgcaccactttctctgctgcgccgccaattgggcagccggtgattaaaatgcgcggacgcgggtccagtcgctggccttcttcccactgctgacgaacgcgggcggtcattgcatccagttcattgatcaacgcctctttatcgaaccggaaggttgcgccgtagactactttcagaatgtcgctgccgctaagcgccggaggatttaactgccccaaatgataaaagttggccagtgcgcgacgttcgcggtttttcagcacaatggcatcgcgtagagcatcttcgctaatctcgtgcccaaaacgttcttctaccgttttatgcaagcgcagcatctcggctttccataacgcgcgtgaggcatcgtccttaacgctgtttggcagttgcatcacatgaacgggcttaaattccgccatgtattcatacattttctttttgccgtcgcaggtggtttcaccgaccaccagatcagaaaagtagaagtaggggcatttatcggttttgccgaagccgtagctgcttttaatcagcgggcagagattgcgcggcaggtctttttccgcttcttcaatggtttcatcagaggtggaacagagtgaaaccacaaccgcaccggctgccattgggatctcttgcggcataaaagtacagtaggtaccaaccagcggaatgccgcgctccttgagatccatgacggtgagaaagcctttctggcgagcttcagagaactgatcgaaaatggcgggtagatcggtgacaagtgacatgattttccttccccgtaccacgggagataatgaaaagaagccacattattaccattcttttagtgcggtttatttgatctctctcgcggttagccacttagtttttcatggatttctaaaaattgccgagggggaacaaagccgggagctgcgacagcaaatacaaaatcagcccaatacatccgccaaccagcgtaccgttaacacgaataaactgcagatctttgccgatatttaattctatttgccgcgacatatcccgcgcatcccagctttttaccgtatcgctgatgtggcgcgtcaggaatgcggaaaactcaggcgcgacgtggtgcgcggcttgttcaagatgaccatttaacgacgcccgcaaggcatcatcggcaattaacgtttcgccaaaccattgacccgctcgtgcgatgcgttctttcacacgagaatcttcactgttgatatccgctttcagccattcccgtaaatccccccacaattcactgagatagcggttaaaagcttcatcttctttcagatagctttttacggcatcggttcgcgctgccatttcaggatcgtttttcagcttgtcgatcagggcaaaggtggcgcgatcaaacgcatggcggatctgatgcgcacgatcgcgactaatatcatcaagcaaagaattcaccgcgtcagaaaccaactccgcgctatgttcgcccagccattcagtgggcaaaattttggctttcagtggatgctcactctccagccagcgaacaatctgctgggcgataaacttgcgcgatttatcgcgctggagaagggcgatcaactgtgcgatcagcgtatccagcagcacctgatgacgatcgtttttggtcatactctccagcatcaacgcactggtgccggaaagatcgaccttatcaatcgcccgatggactgcgcgcttaagcaggcgctgaatacgcgcatcatcggtcagttcaagaaaaccactcatgatctgcaacagatgctgaccaacgcggcgggcgttttctggctgactaaaccagttgccaatcaacaacgccggttcgtgacgtcgaatcaatgccaccagcgattgggtatcgagaaatttttcctgcacgaactgaccgagattttcgccaatccggtctttattacgcgggataatcgccgtatgacgagaaatgatcggaatcggcacgcggcgaaacagcgccaccaccgcaaaccagtccgccagcgcgccgaccatcgccgcttcagcaatcgccttcacgccgctcacccaaaaattgggtggcaaaaacagcgtaacgacaaaggtagcagcggcgataagcagtaaagagagcgccaacattttggcgcgtctgagttcaatgagtttattcataacgttaagaatagagcctgacggcaggatcgcgcaaaaatcaccgctcctccgccagctcggcagcctgatgctggcgcacgcgattgagcaatcccgccagggtgaaaacgacgataacgcccgctacgacggctaacagatgaaacggcaagcgaccgccgttaaaccacagccagcggccgatttcgaccgagacagacatcaccatcaggatcaccatattcagtgatgcggagacggtccctttcggtaagttattggaaaacagcgtaaagcggaataaggtcgggaagattaaaccaatcccgaaagcatacagactggtgccgagcaccgaccactgccagacgtgtggcgacagcaaattgccgacaatcaacagtgcgaggccggccagttgaatgggcacggcacgccagataaaccgcggttcggtcggatctttgataaatcgcgccacgatggtgttggcgacaatcaccgcgccgaataccggaacctgcgtccaggcgaactgcgaagttgttaagccgcccgcatcgatcaggatcaccggcgagacagccacccagctcatcattgggatatagctgagggcgatggttgccgcgccaaagaggaacagccggttgcaaaagacattgcgaaaatcgcgcaagacgcttttggcgctaaacggaaccgcgccgcgcttcaccgtctctggcatcgccagcagcaagccgacaaatgagataaaacccataaccgcaatgatggcaaaaaggactttccagtgcacaaagtgcatcagagctgcgccggaaagcgggccaataatcggcgcaatcagtacgatggaggtgataatcgccatcaacttgatcccttttgtctgtccgaacgcctcctgcaccgtgacataaccaacggtggcaataaaacagatactggtgccctgaattgcacgcgcgataagaaattgtgtcattgacgtggtgaacattgtcgcggcgcaggcaagggtaaaaattaacgccccggtaatcagcaccggcctgcggccaatcctgtcggaaagcggccccagcagccactgcaatgccatgcctccagcgagatagagactgacggcagccggggccagactgacatcggcattaaaatcacggaccacattaatgatccctggctggatcaggtccgtcgacagatacgcagcaaagtcatacaaaatcaacgccatcgggaaaaacagcgtggcggcatggcgggcaaaaaaacgtggcataacaaacaactccttgtccggagaatcccaatggggaaaacgaaattcaataccgtcggtaatgacgaaaggcaggcgagacgggcaaatgtactgaatttcatgtaatcaaccacactgcctgtgaacatacagacagagaaataccttctgactccaggtcagaatgtataacgattacaaatagtcatcagcacattacacctcttgaattgatgggttgcatagaaaatatacaccttaagtgtaattaaaatttgcggttaatcaaaagagtgcggtggaaaggggaatatctgccgggtacaggaaatgtaaaatgcgagcctgtttccggaaaaatgtatcgtttgcagaggaacaaaaatagcctggaaagcacctcggggaacgagaaattgccgggtgagaatggttttgttagtcgctacagtcgggccatcttatctacaggtgacggatcgccatgacaaacttcacgaccagcacgccgcatgacgcattatttaaatcttttctcacccaccctgacaccgcgcgggattttatggagatccacttacccaaagatttacgtgaactgtgcgatctcgacagcttaaaactggaatacgccagctttgtcgatgaaaaattgcgggcgctacattccgatattctgtggtcggtaaagacccgcgaaggagatggctatatttatgtggtgattgaacatcagagccgcgaggatatccatatggcctttcgcctgatgcgatattccatggcggtgatgcagcgccatatcgagcatgataaacgccggccgctaccgctggtcatcccgatgctgttttatcacggtagccgtagtccttacccctggtctttgtgctggctggatgaatttgccgacccggctaccgcacggaagctttataccgcagcgttcccgctggtggatgtcactgtcgtgccagacgacgagattgtgcagcatcgcagagtcgccctgctggagttgatccaaaagcatattcgccagcgcgatctaatggggcttattgatcaactggcagtattactggttacagggtgcgctaatgacagccagataaccgcgctgttaaattacattttactgactggcgatgaagcgcgttttaatgagtttatcagcgaacttatccgtcgaatgccacaacacagggagcgaataatgacgattgcagagcgaattcataatgatggatggctgttgggaagggagagggggaggaaagaagggaaagaagaaggggaaaagagcctcctccgattgttgttgcagaatggggcggatcctgaatggatacaaaagattaccggactttcggcagagcaaatgcaggcattagatcagcccttgcctgaaagcaagcgcgatccatggatcgagtactaatcagagactgatgacaaacgcaaagcagcctgatgcgctacgcttatcaggtctacataacccattaaatatatttaactttaaagattttgtagacctggtaaggcgttcacatcgcatccggtatgaacaaagcgcactttgcctaagccatgctggaacgtggcgattaccctgcaaagataaaacgagtcacactctattcgtgagagtaaatcaggcgcttcgccactatgtcgaatttattccattgcccgatacacggcctcgccaatttgcttcagtgcttcgcgataggtttcgctgagcggcaaagcgcagttggtgcgcagacaattacggtatttgccggaagccgagaaaatcgagcctgccgccacctggattttcatgcggcacagctgccgcgcgacgcagaccatatcgacctgttcaggcaattctatccacagtaaaaatccgcctttcgggcgcgtaatacagatttcgcagggaaaatattcccgtatccagcaggtataaagtgccagattgcgctgatagatctgccgcatccgccggatatggcgatgatagtgaccttccagcacaaacgttgccgccgccatttgcgtggacggcacattaaagctgctgatggcatatttcatatgcagcagtttatcgtgatagcgccccggtgcgacccagcccacgcgcaggccaggtgcaatacttttactgaacgagccgcacagcagcactcgcccgtcgatatcccaggaatgaatggtccgcgggcgcggatactccgttgccagttcaccgtagacatcatcttcaaaaatcacaatatcatgacgctgagcgagagagagaacggcccgtttgcgcgcgtccggcataataaatcccagcggattattacagtttggcaccagaatgatgcctttaatcggccactgctccagcgccagttccagcgcttcaacgctgatgcctgtttctggatcggttgggatttcaatcactttcacgcccatgccacgcagcatctgcatcgaaccgtaataacagggggattcgaccgcgacaatatcgcccggtttacacaccgccattaacgccagcgacatcgagttatggcagccgctggtaatgatgatgtcatcggcggtgactaccgagccgctgtcgagcatcaggcgggcaatctgctctcgcaacactcgctgaccggctaacaagtcataaccgagaacggtttgcagattatgctgcaccacccggcttagctcccgccacagcggtttcaggctgggcgtttcgacatccggcgtgcttttgcttaacggaacaatggaactgtcgctatgcgcctccagcatatccagtacctgatcccactgggtaatttccaccgggcgctgcaccggacgcgtcatcggcggcactggcggctgggctttacgttgtgcgacaaaataccccgaacgcggctgcggagtgatgagcttcatcgtttccagcgtctggtacgcctgctgcacggtgctgatgctgacgccgtgctcctgacttaagctgcgcaccgacggcaatttctccccgtgacgatacagcccctgctcaatccgctcggcaagtagagtcgccagatgttgataacgcgtcatgctgtattccttatttggaccatacagagagaaaaaccggtacagatgaggctaaaaaaccggatgcagatgctgttttaatctgtctgtatgttaaataaaactaatatttgcatctgtattgtgaactgccagaagacggatgatgaagcctctgaaagatgaggaggcagcagatggaattttacgaaaacaaagccaaaacgccgtttatcagacttgtgcaactctggcaggcggtgaggcgttggcggcggcaaatgcagacccgacgagtgttacagcagatgagtgatgagcggttgagggatattgggttacgcagggaggatgtggagtgagggggaaaattccccttcccgtgtggggaaggggagagaaacttagcgtggcgttttgctactaatcaccccaataaactcctgcacctgcctttgtttacgcaccgacagtttgcacacctggcgcagtgactgcatcagttcgctctcttcgatggcgggtggttgggcggtgaggacaatacagccttccatcactttgacatctaccgccgtgccggtggcaaaaccggcggtttccagccactgacctttcagggtgatggcgggaatacggctgtaatccgggtagcggctcgcataactcacggttaattgacggttatttgccggggagacttctgcttcaaacggtagtgcaatagaatgcgtgtcagtcataactgctattccctataaatagtgattgtgatgagcggtgcgggtgtgttggcgcacatccgcatcgcgctaaatacctggatatatcatcagtaaatatggggaaagtccagctaaaaatagaaaataataaaagcattactggaaagatctggaagggaaattaacgttaattcagaatggccggataacaaagtgtatccggccttcataattaatttaaagaactcatatggtgttctttaaaattctctgcctgtgccagcacacccatataaacatcatcattcgctactggcgggaacttatgcttgtgtagaagcagaataagttcaactttcagtttcgctttaatatcatcgcgtttactccagtcaggatatttagatgtgttgtcaaccacgcttttcatctcttttgccagtgacagcattttttcatcgtcataggtgaactgatatttatcgcgcatatgagcaagaatgtcgaaaaaggctttttcttcaatatcaatgcctaaatcggcccaggtgcccatttcggttttaatatcatagataatatcggtcatttcctgactgaatgtatcgaattcttcaccgttgagtacatcatcttctcgccgctcattataacgatctataatcgcctggaagcggcgggtgaagttaatcccttgcaactggttcactttcttgaagtcgctgatcgctttttccagtaatttttgtaataactggatcttcgttgccggaagtttgatcttgttaattcgcgccagataatcttcgtcaaaaatatcgatggattccgcttttttatcgccaagaaaataaatttcttctacgccatcagcttttaacgcttctgcaatcatttcacgaacgcgtgcattcatctgggtaacatccggtgcgtcacctttcgtcagtttgaaaacaattgaacgaacagcaagataatagtgaatatagtcacgttctgtctgtgataatgcttcgctgccgcagcagacgtcgtaggcggctttcatgcgtttaaccagtcccataaaacgacgttcaactttctgggtacgcagaacaaattccgccgcgcggttgaggcaggataattgcgcttgtggctcaccactaaaataatcccgactgtcaaattcgtaaaagacttgccccaacaaatcgagatggtttttaacttctattaccgattgctgaatatcttcaaagttggtggcatcaatgcgggaatacattgccagtgcctggttcatctgacttttaatgccgatgtagtccaccactaaccctttacttttgccttccagtttacggttaacgcgagaaatagtctggataagattatgtttttgtaagggtttatcaatatagatggtatccagttccgggacgtcgaaaccggtcagccacatatcaacaacaatggcaattttgaaattcgatttagcgtttttgaactgcttatccagctctttgcgatattcttttgtgcccagtaaatcataaagcgcctcgtcgtcatctttaccgcgcgtcatgaccatcttcaccatttctgaaggcggtaactctttctgctcctgttccgtcaggacgacgccatcgggtgcttgcttcacttcaaaccaggcagggcgaatagctttaagctgacggtagaaatcccaggcaatttcacggctggcacaaacaaacatggctttgccttttacggtggaaccttcggctacgcgtttttcataatgtttggcaaaatcttctgcgagggcttttaaccgatcttcatcacccagaaccgcattcatggtggcggtggcttttttgctttcgtcgatttgccactcattggtgcctgcgtttgcgcactcttcgtaatacttttcgacttcttccagtttgctggagtccaggatcactttagccgcacggccttcgtacacgatgcgtacagtgatttcatcctgaacggattcggtcatggtgtaactgtcgatcacctcaccgaagacatcgagcgtcgcgtcaatcggtgtgccggtaaagccaacataggtggcgtttggcagtgaatcgtgcaggtatttcgcaaagccatacgttttgcgcacttttccgctttctttatcaacgatgactttctggtcgaggttaacctggctacgatgtgcttcgtccgagatgcaaatgatattgttgcgttcagaaaggagttcggtgtcttcggtgaatttatggatcgttgtcagaaagactccgccactattgcgtcctgccagttgattacgcaaatcttcacggctggtaacgggaacgatggtgtcgtcgccaatgtaatttttggcgttgcacatttgcgcagaaagctgatcgtccagatcggtgcggtcggtgatcaaaacaatggtcgggctggcaaactccacgctcttcatcaaaagacgcgttaaaaattgcatggtgtaacttttaccacagcccgttgcgccaaagtaagtgccgcctttaccgctaccgaaaggtttacgcgcttgcttgatgctgtaatagagtttgcgggcggcatagtactgcggatatcggcagcaaatttttacttcgtgcttggctttatccgggaagcagataaagtttttaatcacatccagcagacgtaccggatgaaacagcccctgaatcattgagtgcaatgatggaattccgtcctgttcacggttttcattaccggtgactttgcgccatgagtaaaagtattcatagggcgcaaacaggttgcccatccggttatttacgccatcgctaataatgcagagcgcgttgtagataaacagttgcggaatatcccggcgatagcgtttacagagctgcttccaggcatcgccaatactggcttcctgctcgcgcaccgcacttttaaattcaaagacgaccaatggcagaccattgatatagagaatgccgtcaggaatacgagtctgattatctttgccggagattttaagctggttaacaatcttaatccggttaagcggcggattcatataggaaggcgggagttccgccgcctgttgcaacgggacatcttcggcgtcaaatatctggcgcagtgcggcaggtagatgccgggtgtcgagcaattcaatatagagatctttttgttgccgatcgtcgcgtttgaacagaaaaccatttgccagccagcgacaaaatgttttgttgctttcataaagatcggaggccggaagcgtggtgaactgtttgatcagtcgctgaatctcttcttcagtaatgccatcaggctggtagcgtgccgctaaataatgacggagatcgtcttcgataatgacctgatcgaggctcgaacgtgggacattatcgccgatcaggtgttgatatccctgatcctgtaacagttcaatgatcgcttgttctaattttgcttcactgaaagagagactcatatcgcgctccaaccctggctaatttctggtaagcattcccgtatcagtagaaaaccttaccagaaagcccctgattttacaggggcaaaatgcgttatgcggcttctgtatcggtggtgagatccggaagatcttccagggatagctcgccggagatgagtttcgggagcaaggtgcctcggaggttggtgagatattcgttttgaattaatgagttattcatcatctctctgaaattgcttgttaattcatcaaatttctcaattatatttattgatggaataattagaggtaatgtacaaatatcatcaggttttatagcaggatatgctccaccatcagcaattctcgctagttcttctatatttttatcataggtcacaaagtaataaatgaaatttttatatatcgtcttttgggctctaataacggcaaagcctgtgctacccgttagaccatcaacatgtacatatgcaaatgatctgttagcaggtctgacaaggccaaaaatcagatcatctttttttaatattcttcgagctcgacttggagcatcattaaatgataatttttcaattgagtatattctgccatctttcgcattagagagatctacataattgatataatctggttgatttttattagtccacgatgtggagtttataaaagctatctctggaagcgtcccttctttccacccctttggcacccaacccaactccgtttcttcaaattcacttgggaaaagcgagcgaatttccgccggaagcggtttaaaatctgcactattacgtactttttgacgcaatttggcgcgagtttgcagggcttccgggattggatttcctgcatccagagcgttatcaatcactggatcaaaatccacaaaccaggatttgaacagggtttgggacatttgttccaaggtttggttcatggatgaaagtgttgtgattttgtcatcaaaagctttgagactcttgactattaaatcttgaacatttagcgaaggagcagatatttctacattcgctagatcattgatggttatttggctttgagcagaaccgctatcaagatatcgtaaattactctgtagaaacagataataaaaatattcttttcttacttttgtttcatccaaatttattttaatggacaaatttgttaaataacaatctctagtcgttattttaacatcgccagttccaccaacacctcgggcaacaacaattaactcacctgccgaagtatttttttcagggtagctttctgtgtatttatatcctgaaaaaatgacatagtcacctgtaccaacaaactcctttttaggcatttttccgtatgaaaattcagctatatcacctaagcgatatatacaccacttactccccataacccagcgcctccagattctggcgaatcgcacgatccagttcttccgcctgcttcatctgctcaaacaacgtcttcgacaattcacgcattttggtctcaaatgccacgccgtcttcttcctgctcggctgcacccacatagcggcccggtgtcagaacgtagtcgttatctttaatatcttgcagggtcgcaactttgcagaagcctgcctggtcttcatatttttccagcttgctgtcaccacgcgcaatccgtgcagccagttcttccggcgtgctgcgccaggcatggtaggtatcggcgattgtggcaatatcttccgccgttaactctttagttgtgcggctaatcatggtgccgaggttacgcgcatcaataaacagcgtctcgccctgacgatcacgataacctttggccgggtcggcagccttcgatttggtcataaaccataaacacaccgggatctgcgtggtgtagaacaactgtccaggtagggcgatcatgcagtcaatcagatcattttcgatcatctgtgcacggatctcgccttcaccgctggtgttagaactcatcgaaccgtttgccagcacaaaacctgctgtgccgttagccgacagcttggagagcatatgcaaaatccagccgtagttggcgttaccggttggcggcatacgataaccggcaaagcgtggatcttcggttaattcggcttcattgcgccagtctttcaggttgaacggcgggttcgccagaatgtagtcggctttcaggtccgggtgctggtcgctaaagaaagtgtttgccgggcgttcgccgaggttagctgaaagaccgcgaatggcgaggttcatttttgccagtttatacgtcgtggctgtcagttcctgaccatacagcgcgatatcacggcttttaccctgatggctctcgacgaacttcaccgactgcacgaacatccctgccgagccgcagcacgggtcataaattttgccctggaagggttcgagcatttcagttaacagcgtgaccacacatttgggcgtgtagaactctccaccgcctttgccttcggttgcggcaaacttaccgaggaagtattcgtaaacgcgtccgaccaggtcttctttcgacaacgtttcaacgtcagtttcgtgtgccagcgtttcgatgttgtcgatggtatcaatcagtgacgccagttttttggtttccagattctgacggctgaagtagttgtctggcagcgcgcctttcagggttgggttacgtttctcaattgtcgagagggcggtgtcaatacgaaccgcaatatcgtcctgtttggcattttgtttgataaacgaccagcgcgcctcttccggcaggtagaaaatgttgtcctgctggtagaacacttccatctcaaggaagtcagcttgcccatcggcaatcatttttttgcggcgtgcttcaaacttatcgctgatgaatttcaggaacacgaggcttaacaccacgtgcttgtattcggaggactcaacgctaccgcgaagttggtttgcggtatcccataatgtttcttcaaagcctttttttgctttggcttttttagttggtgctttggccatgatgaactctgttcagataaattgggtcgctattgtaatggttgaggcggcggatttcgccctttaatccatctccagctcatcaaacaactgcaaatccacatccagcaattccactgcattgctgcggcgaatgccgacgttattttcgattaacagttccagtaagcgatcgccgtcgataagcgtaatgggcgcggcccccggaaagagcgccgcttctgcacatttcgctgcaaatttcccggtggtgatgagcgtaccgcgaatggccttgtggtaaggcaacgctccgcgcaactggtcgatatacggtcgagtgatggtgttctgcattcttttgacctgcaccacttcggtaatagtggtgatgccgacctgcacctgaccaatcacgtccacacctttatcgcctgaggctttggtcacttcgacctgctcgtagcccattgcttccagtaattgaccgaccagttgttcaaatttgtacgggttcattgtgctgatttgttcgcgcagcagctctttttgctgctcgttgtagcgtttcaccgcttccagcagctctttacgcggatcgctttttcgtgctggcaacgcttttccaagccaggcgcgtccggtatcggtgatgcaatagctcataccttcgcgagtaaccatgccacggtcaataaggttatagagacgggagtagagcgtgcttttcactgaacttgcagacgcgaatttcgaatgctgatgcaaaaaggcctgccattccggcaataaatcggcgcggcgcgacatttctcggccagccagcagctcaagcagttgcagaatgccttcctggtcatccagtgaacgcagcgttttttcgtcatcttgcaggaatttttgcccgcgcgaggtgggctgccaggtatcatctggcgtgctttccatcagctcaaactggggatagttgaggaataagtagcagccgtagctgtggcgcgggttcaatatgtgattatctgtatcccaaatacgacgggcgatgtcggcatcttcgcccgttaagcgttcgctgatccacaggtcaggttccgaccagtcaacgggtttttgcggcgtaccggtttgatcgcgaatggcggtaatcatattgcgtaccgctttcagggaatagcctgagacggctttcatcatagctttaacctgtgcataggtaggaaaaagcggggtaataactttatagtttttcacggtaatcccttaacgacagcgaggtgtttagtgtgccatgtcaggcgagaaattctattggatgaatcaagtccaacttactcattgtcaatttcatggttgattatccaaaacgtgatgctatttccaacatcaacgctataattgcagaataattgtagatacatttttgtatatacaattagggatggcaactatgccaatggagtttgaatgggatgcaaacaaggccaaaagtaatcgggtgaaacatggcatccgctttgaagatgcggtgttagtgtttgatgatccacaacatttgtcacagcaagatcgcatagaaaacggtgagtatcgctggcagactatcggcctggttcacggtatcgtggttattctggttgcgcataccatccgtttcgaaagcggaaatgaaattattcgaatcatcagtgcacgaaaagcagatcgtaaagagaggagccgctatgagcatggttaaacataaacgagggacaccctctacactcgatgtgcagcatgaggccgaactgaaggcactggcgaataaattcgacgaagatattgattacagtgatatcccgccttccagcgatgagcaatggtctaacgcagaacgcggtaagttttatcggccattgaaaacccaggcttcggtgcgtattgatgctgatgtgatggaatggctgaagcgacctggtaaaggctatcaaactcgcctgaacgcaattttacgtgaagcgatgctgcgcgatcagaacaaaaaataattcaggccgccacatggcggccatcatccataattacttcctcaaccccgcaaacgccgcccgaatctcttcctccggcaactgaatcccgataaacaccatcgtgctatgcggtttttcatcgccccacgggcggtcccagtcggcgctgtagaggcgctggacgccctggaacagcaggcggttaggttcgccgtcaatccacagcatccctttgtaacgcagcagtttatccgccgattccagcagcaggttttccatcacccgggaaacttcgctgatatctaccgggtaatccagttccaccacaatcgacgaaatatcgttttgtttatccgcgataaagtggaaacgcggtttggtgctgatgacgttctcttccagcataaaaccgttggtgttgaacagcaggcccaggtcgatgtcgccgtgggtgacggtgtagaccggtgcacgggcgttgatgcgcgccaggcgttcacgcagtttttctgcttcgcctgcgacgtcggttttagtcagcagaatacggtcggcgtagcccacttgtgactgggcgatggtgaactggttcatctgctcatcggcatgtaccgcatccaccagcgcaatcacgccgtccagcaggtaacgctggcataaaatctcatgggagaaaaaggtctgaataatcgggccgggatcggccatgccggtgcattcaatgaccagacggtcgaactgaatattgcccttgtcgagattatccagcaggtcgagtagtgcgtcttccagctcgttggagcgcgaacagcagatgcagccgttggtcagcgttttgatctgcgtggcgcggtcgccaatcagttgatcatcaacggagacttcgccgaattcgttttcaatcacggcaatcttgtagccgtgttgttcgttaagaatatggcgcagcagggtggttttgcctgcgcctaaaaaaccggtgagtagggtaactgcaatcgggttcatgctctctccattaacaacagcgcataccgcctttaccatcgccgccgtagcgcgcattctggcgttcgcggaagaattcttcatagctcatgtacggcttgtcgggatggttggtcttcatatgctcgacgtagttgtcgtagtctggaatgccaatcaacatcttcgccgcctggccgagatatttttttgcctgtcctaagttaccaaacatagttcactctgtattaagaacaaagccccgccgaagcggggctaaacacggttagtggtgcgaagagatcttcacgccgccttccgggattggaacgtacggtgtttctttgtcagtacgtttgtcgctgttacgcaccgcaagccacgttttgaaaccgtagaagatgatgctgtacaccacaatcaggaacagaatactcaggcccgcgttggtgtagttgttcacaacgatgtggttcatgttggcaatctgctgcgccgtcaggtcagtaccgttagcaatcttctctttgtactggcttgccatgtagaagaagccttccatctgcgggttggtgctgaacagtttcaggcccagcgcccaggtggtgcagataagcagccatacagccggaacaacagttacccagatgtattgggtgcgcttcatcttaatcagcacaacggtgcccagtaccagcgctacggctgccagcatctggttggaaataccgaacagcggccacaggctcttaacgccgcccagcggatcgaccacgccctgatacagcaggtagccccacagacccacacagcccgcagtaccgatgataccggcaaccagagagtcggtttttttcaggaacgggatgaagttacccagcaggtcttgcagcataaagcggccagaacgggtacccgcatccagcgcggtcaggatgaacagtgcttcgaacagaataccgaagtgataccagaagcccatgtcagccatcggcagcactttgtggaacacgtgagcgatacctaccgccagcgtcggcgcaccacctgcacggttcaggacagaaggctcaccaatgtctttcgcggtttgcaggatctgctctggcgaaatcacgaagccccaggagctgacggtcgctgccgcgtgtgcggtaacgtctttcagctgcgccatgatgatcggcgcgttctcgccacccatttcatgcaggttaggcatggtgatgccaaggccagcaggcggggtgttcatcgcgaagtaaagacccggttcgatgatggacgcagcaaccagcgccataatcgccacgaaggactccatcagcattgcgccgtagccgatgaaacgcgcgtcggtttcattagccagcagttttggcgtcgtaccggaagagatcagcgcgtggaagccagataccgcaccacaggcgatggtgatgaacaggaacgggaacagagcgcctttccacagcgggccagtaccgtcaatgtactgggtcatggcaggcattttcagttccgggttcagcaccacgatacccagcgccaggccgacgataacgccgattttcaggaaggttgccagatagtcgcgcggtgcgaggatcagccacaccggcagcagtgcggaaacaaacgcatagccaatcagcgcgaaggtaatggtggtgtctttaaaggtcagtgccggaccccagtacggatcgtgagcaatcacgccaccgaagtagatagaggcaaccagcagcacgataccaatgacagagacttcacccacacgccccggacgaataaagcgcatgtagatacccataaacagcgcaatcggtacggttgagcaaacggtgaagacaccccacggactttcggccagggctttaaccacaatcagcgccaggacggcgaggatgatgatcatgattaagaaacagccaaacagcgcgatagtccccggtactggtcccatctcttctttgatcatctcaccaagagatgcgccattacggcgagaggagataaacagcaccataaagtcctgaaccgcaccggccagcacgacccccgccagcagccacagcgtgccaggcaggtagcccatctgcgcggcgagaaccggacccaccagcggaccagcaccggcgatagcggcgaagtggtgaccaaacaacacgtaacggttggtcggaacgtagttcagaccgtcgttgttaataaccgcaggcgtcgcgcgcgtggggtcgagtttcatcaccttctgggcgatgtacagactgtagtagcgatacgccaccagatacaccgatacagaggcgaccacgatccacagggcgctgacgtgctccccccgacgtaatgcaactaccgcgaggcagaatgcaccgatgattccgagaatcacccagggtatgtgcttgaatatctttttagtatccatagtaaaacctggcatgtattgattaatagttggccgaagccgttctaggtttgcgttgcgtttgaggaggtaaattgaccgctatcctgtagtgatgttgccagagttacgcgcgcgtaaagtaaggtaaataactgagtggttattttagggatgtaagcggtcagttttggcggtgagcggcaaaggcgtcgtttaagtgacgataaatatgtgattcatatcacatatttatattgtgaataatttatgtaaataatggctttttaaattcagagtgtgaataaaattactcggcgtaatctccgcgggatattcataaagtttttcctttccaggccgaaaatcttgcatcggtccacaggaaagagaaaccatgttaaaacgtatcaaaattgtgaccagcttactgctggttttggccgtttttggccttttacaactgacatcaggcggtctgttctttaatgccttaaagaatgacaaagaaaatttcactgttttacaaaccattcgccagcagcaatccacgctgaatggcagctgggtcgcgttgttgcagacgcgtaacaccctcaaccgcgcgggtatccgctacatgatggatcagaataatattggtagcggttcaaccgttgctgagctgatgcagagtgccagtatttcgctgaaacaggcggaaaaaaactgggcggattacgaagcgttgccgcgtgacccgcgtcagagcaccgccgcagcggcagagatcaaacgtaattacgatatttatcacaatgcgctggcggagctgatccaactgttaggtgcaggcaaaatcaacgagttctttgatcagccgactcagggatatcaggacggtttcgagaagcagtatgtggcttacatggaacaaaacgatcggctccatgatatcgccgtcagcgataacaatgcctcctacagccaggcgatgtggattctggtgggcgtgatgatcgtcgtactggcggtcatcttcgccgtctggttcggtattaaagcctcgctggtagcgccaatgaatcgcctgattgacagcattcgtcatattgcaggcggcgatctggtgaaaccgattgaggtggatggctctaatgagatggggcaactggcagagagtttgcgccatatgcagggagagctgatgcgtaccgtcggtgatgtgcgcaacggggccaatgccatctatagcggtgccagcgaaatcgctaccggcaataacgatctctcttcgcgcaccgagcaacaggctgcttcgctggaagagacggcagccagcatggagcaactgaccgcaacggtgaaacagaacgccgagaatgcgcgccaggccagccacctggcgttaagtgcttctgaaacggcgcaacgcggcggcaaagtggtagataacgtggtgcagactatgcgtgatatctccaccagttcgcagaaaatcgccgatattatcagcgtaattgacggcattgccttccagaccaatattctggctttgaacgcggcggttgaagcagcgcgtgcgggtgagcaaggacgtggttttgcggtggttgcgggagaagtgcgtaatctggcccagcgtagcgcccaggcggctcgtgaaattaaaagcctgattgaagactcggtggggaaagtggatgttggctctacgctggtcgaaagcgccggggaaacaatggcggagattgtcagtgctgtgacccgcgtgacggacattatgggcgaaattgcttctgcttctgatgagcagagccgtggtatcgatcaggttggcttagcggttgctgagatggaccgggtaactcaacagaacgccgcgctggtggaagaatctgccgccgccgccgccgcgctggaagagcaggccagtcgcctgaccgaagcagtggcagtgttccggattcagcaacagcagcaacagcagcgtgaaacatcggctgtggtaaaaaccgtgatgccagctgcgccgcgtaaaatggccgtggcagatagcggtgagaactgggaaacgttttaatcgccataaaaatgcccgataagcaaaatgttatcgggcatagggagattaatctttccgtgggtcgttgatcggctgacgaaccaggaagatgtacgccagtgcccccgctgcggtgacgcaaccgcagatgattagtgccagacggaatgagtgggtggtatcaacaataaaaccagtaatgatcggcgcaaaagaggcgcagatgaagctggcaaagttctggatactgcccaccgacgcagtcatgcgagaagcaactgcgacgtggatcaagccccagcaggatgttccggcaaagtgaatacagaacagtgccataccaatcagcagaaccgctgtcatggatgttgtcgcttgcggtacgaccagcgtaaaggcggcagaacagaacatcccggcaataatgcagatcttacggcttttaatcggagccattccccctttgaccagccagtcagtaacgtaaccgttgaccagcatcccggcagccccaaacaggaaagggatagccgccatcaaccctgtgctttttaaatccaggttataggctgtttgcaggtaaccaggaagccaggccagatacagccacgcagtgtagttgatgccactgaatccgagcatcattccccacattgtgcggttacggaacaagctgcgccattcggcaaaactgagcggatctcggcgggcattgacgctacctgcattgagataagcttgttcaacggcagtcagttctacgtgctcgcggttgcgatagagcatataccagccgatggcgagaaaaatccccagtacaccaatggtaataaacatcccgcgccagcccatcaccagcatcatcgccgccagaatcggtgggcttacggcaacgccaatggtagaagctgcgttgaagaagcccatcgggcgtccgcgctctttgatgttgaaccagtcgttaatgacttttacaccgcatgggttcatcggcgcttcaccaattcccataccgatacgcaccaacacgaactgcgtaaagctgtgcaccatgccagacattgcctggaacagtgaccagaagaacatccccagtcccaacatcaggcgcgggcctttacgatccaatagtgggccgcaaggaagttgcgcaatcccgtaagcgagtgaaaacacggagagcaaagcgccgatttcggtggcacttaatcccaattcttcacgaatcgttaaatttgctaccgacagcgaactgcggtcgagataattgattaccgccgcaaaaaataataacaacatggcggtggtttgaatgcgtttaattcgggtactgcgttgaactaatccatctggtggcacgggaatatctgccgacgaagatggagtaaatgaagaacgcggatcgagggtgatattttctttttccacgccggactcctgtatttataattttaattgtttacgtaattgtgcattacgcaaggttgacattaacggcaggttaaagttttaggactttactaccgctcacaaaaaaacatttttagtcgactgattgtgagcataggtaagcgggaattttccggtatttatcttttgataaaaccgtgcacccgctaatagtttgctgtttttaatccgtacttaatgagcataacgcatgttctcattaatggatcgaatcattgattgtttagctgaattcaaatggttaactacggagcgcaagggtggcatcaaggtcactgcggcaaatcagagcgctgagaatggtcatatgctcatcgacggcaatgatattgcgctgtttaagatcgctttcgtcccattgatagtgaaaatgaaagatgactgatatgatctcaagcgattgttcaaaaaagatattgtcggcagctgaaagcagtaaggagtgaaaatctctgtcaagttgcgagaacatgcgaaagctattgccgatgttgtcacgcagtagcctgtgacgttcgagcatggttttcgcctgcagccagcggggatcatgatcaggcaggttgagaaagtgctgaagtgaatgtgtttcgagcatttcgcgtagctcaaacagctgctcggcgtaggattgatcgaattgcttcatgctccactggccgcgcttttcgctttgaataagattataacggccgaattttaaaagatattctcttacaaccaccgggctgacacccgcggcccgagccagttgcagttcagaaaaagtttcccctgggcgtaactggcgctggtttatcatcgtgaaaaaagcctgctcaaacactttgttttgttcactcattgaagcggtagtacaggcgaaaccgtcatcatggtcaggtttacgcgcaataacatagtcgtttccaacctgcgttaagacgccgcattcgcgtaagtggctgagaatatgacgcactgtagtgcggctgatgttgtacatttccgccagcgcactttgcgatggaagtggggaagggatatgaccccgcgccatatcatcaatgacctggttaatcacattgtggcgtaaattttgtgaacgactcatattttcctccttgtgagtccattaaaacccgatttaaaacatttttatgcgcgtgttttcacaaaacagattttccgttccgctgccatttttcattttcattgatatctaaggcaacaaaaaatggagagccgaatcatgtctacgatgaatgttttaatttgccagcagccgaaagaattagtctggaaacaacgcgagattcctattccgggtgacaatgaagcattaataaaaattaagtctgtcgggatttgcggtaccgatattcatgcctggggtggaaatcaaccattttttagttatccacgggttttaggccatgaaatatgtggggaggttgttgggctgggtaaaaatgttgctgatcttaaaaatggtcagcaagttgctgtgatcccttatgttgcctgtcagcaatgcccggcgtgtaaaagcgggcgtaccaattgctgtgaaaaaatttcagtcattggcgtgcatcaggatggcggttttagtgagtatttgagcgtgccggtggcgaacattttgcccgcagacggtattgacccgcaggcggccgcattgattgaacctttcgctattagcgctcatgcggtgcgtcgcgcagccattgctcccggcgagcaggtgctggtggtcggagcggggccaatcggtctgggcgcggcggcaatcgctaaagccgatggcgcacaggtggtggtggcggataccagtccggcgcgccgtgaacatgtggcaacgcgtctggagttgcccgtgctggacccgtcagccgaagattttgacgcgcagctgcgggcgcagtttggtggttcgctggcgcagaaagtgatcgacgcgacaggtaatcaacatgcgatgaataacaccgtgaatctgattcgtcacggcggcacggtggtatttgtcggcctgtttaaaggtgagttgcagttctccgatccggaattccataaaaaagaaacgacgatgatgggcagccgcaacgccacgccggaagatttcgctaaagtcggtcgacttatggcggaagggaaaatcactgccgacatgatgttaacccatcgctatccgttcgccacgctggcagaaacctacgagcgcgatgtgattaacaatcgtgagttaattaaaggcgtaattactttctgataaggcgagattattaaagttgccatgcagcgtccggggaagtgttgggcgctgttttttttctgtttctcaatgatgttttgtaggccggagaaggtgtgtaggtcgcaccttatgcgacctacacatcagtcaggaattacccttcacgttccacaactttaatttccaccatgccgatcccgagcttacgcggcgagtgtccgaggatattcccttcgttggttgagacaggttccggcggcacaattaccagtgtgtcggcatcggttgggttatcgaaatgcagtgtggtggtggtcacttcattgcccagcacaagagtttgttcttcattgcctacgcgtaccggaataggacggctggcgttattgccgtatgctttggcggtaatcaccaggtcaaatttcttcggcagcggatgcttgtactcgatttttacttcatcgcccagctgcgcgttggaccagcggccccacgactccggacgggaaatcccgctaaactgtttcacctcttctggcgcaccggcgacgttaaagatgaaactgtcggctttgtagcgaatatcgttatcaacaatcttcagcgtatcgacattgcctttgtaacgcgccatgtcgatgaccgtatctttaaatgccgtcttgctcttccatgttgttttgtcaacatgctggacaatttgctgaccgccaagctgcccctgcgagacacaccagtcggtggaaagtgccagttccggagcccagagttgtgccatcttatagcaacggtcaacccagacgaaattgtcgcgtggagcgaaatcggccagctggaaacgcagcggtgctgagtattcgctttccggcagcggttccacgcgtttgtctgaaacccgcaacagcagcggcaaacggaaatggctacccgagaaggcaatcatgtttttctgctggtcgatggtgaactctttcatctctttagggaatttccacaggcggatgatatctggcttccacgtcaatgttttctctttgatattgaggaagatttccgacatcgactgcccggataaactgctacgaccaagtccgagatagttatcgccaccgagaatgtccagcaccgtcgcgccgttatccatcgtgttacgcttcactgccagcgtctcttgctgcggcttgtcgccacgaatgacaaaaaacaggttattgcgatcctgcttattgaggtatttccacgccgtgttgttcatcgctaaatggtcagaagagacgacgatgacagtatctttaaaccacggtgacgctttgattttgttgataaacgtcgcgatattctcctggctgcaacttaccgcgctgaatgactgattcggtttaccgtcaaaatcatattttttgcggttacaggtacgagaaataaaaccatccgggtgatgggtatcgactgtcagggtaaacagtgagaatcgctgacctgagcgggaaagctcttcaaactttttccacgcttcatcgagaacggtatcgtcgtagaatccccagtcgttgcgatagtgcgggtcggctaccacgcttttcagctcttctgagccgtataagtggtcgaagccgtgcgatttcaggaacacatctttaccggcaaaacgcagatttgcgccctgcacgaaatagttctgataacccgagtttttcaggatatcgcccagacagatgttctgcgggaagaagctggagacagaggcggaggcgttgccttcaaagggggcaaacagcggtatgccgcactgagaagccaccatgcccgcaatcgtgtaatccgttcctggcagctgctgcgtgtggctgaaatccaggccttcatttttcaacgcgcccagttcaggcgtgagatccgggaaagcctcgttatcaaaataggttcgctcgagactttcgccatagatataaaccaggttgagtttcgggtcagggatagttttcgacggctctttataataagccgcaaagtccgggtcgccatcgcgtgactgggatttcaccagttccgttatctgacgaaatgccgggctggcgtccaccgaacccagcgccagtaagagcgccagcaggctgtaaccaaaatggtgcggatgatggcgacgacggcgcaggatccagcccagcgcaccgaacaccgctgtcagccccagcacaatgccgatacccggcaggatgtatttgctgacgccagcaccggtcaggctgttggttaaggtatagagaaccgcgtcgttaataccatcgccagtaaaatagtcgctggcaaacagggtgatatttaaaacgacaaatagccccagcactgttaatgtggctgcaaaccaccaggtgttacgtcccgctttccatgcgtaaatcagcacagaggcgagaaaaagggcgaaagagagtagttctgacaacgggcgatcctcactaaaccgggccgtttagccaacgtttaagctttttgagaagcacaatgtaatggcgtcgccatattgctgcaattctagtgtcaaaaaaatgcgatgttgttaggaattagtttataaacagacttttttgatcgcggtcgcttcccgtgtaacagggggaaaaccgtccaggagcagggaaaagggcaggagagagccgcgtcagccgggtaacagctaaaacgcggcgtttcgcggttcaggaaatgaagttcagcccctgctttaacaccagatcgcaggctttggttttcaccttttctgccagcggagtcgttccgatgttatccagattgagttgctgaccatctttggttttcagcaaaccctgaatgccatccagatagttggtgtcttctttttgctcttcactgttcaggcccagcttttccagcacctggttcttgatgttttcggcatcggttaccgaagccagcttttgcttcgcgcagtattgcagaatgcctgcggcgttgttcatgttatctgcgcttaaggcctggttcccgctgctaagcaagttagttaatgacgcgagcgaccaaccgccttcctgtgtcgtgctgttttggttgccaagttcgctggcggagctggagagcgcatctttccaggacgcagcatgcaccccggtggaaattaatgcgctggcggcaatggcacagcacagaagatgtttaacagttttcatcatcattactcaaggtggaattgtgtcgcagtataccgccagaaacggggattaatactctttacctgttacacggctacggtagctatcccagttgaagatcacccacaaactgttacccaggcgcatacggtccatcacgcgttcgcccagcaacttggtcatctcttccatattactgttggtcagcatcccggttgggcgtttggaagaagagcggcgatcgacgatctggttgatgatcactttttcgtatttcgattcggtctgcacgccgatctcatcgatcaccagcagatcaacgttgctcagatcgttaagcagttgttcttcgctggtaccgctattcctgaaggtatctttcatcgccgacataatatcggccacggtgatgatcaatacggatttaccgcgtagcagcagctcgttgcagattgccgccgccagatggtttttgccggttcctggcttaccagaaaagatgaagctggcgatgttgccgtcaaactcttcgacatactggcgcgctttgcttaacgcattcatctgcccttcacactcaacgcgatagttctcaaaggagcagttctgatgcagtggacgaataccggagcggttaaaggtgcgctgcattttcatcgcccgattttcacgttcgagagcggcggagcggatcgccccttgttctttctgccaggccagtagctcttcacccgttttgaatgcaggtttgatatgggcaggcatcattttttgcaggcgttgcatcaggtcgccaacgtttttcatcgttaccctctgaatcctggtggaatttggctgtcaggttcgctgaccgtattcacatctcgtttcggcagtccgccgttgctggcacgaccgatttgcaggctgcgcgccagtttttgttgccactgcacatggtgaaagactttaccttccgcctgccagtaggcaatgaatgaggccagttcttcggtggtcaccggctctcttagcgccacgccccatagcgccgccaggcggataaagtcggcatcgggttgccagtccggatacatggcgaatttccccatggggacagcaacgggagcggcttgcggttcctgatagagttgatcgtccagagcgacatcgcttcccggacgcgccagcttttcttccagcgccagcagttcagccaggcgtgcaggcgtgacggcataaaacgccggggcattgttagcaaatacggcaaccacaccgccttcagcttttgccagaacggtttggtgatcgtgtaccagggcgtcaataccaacgacgtccggggtcaaaactctggaagacatactgtttctcaaatatggaacgatgaacgagaagggagataacttttatagtaacacacggaggagaggaggctgtctctcatccgtgtgctttaagcgaggcaattttatacgcgagggcgcttgcggtacaaccataatccaggaatggaaagaccgatggataacgcaccaacaatcgatgaagctgtaagaaagttggttaacagggtaatcatcaacggttcgctgtaacctaactggctgatttttaccgccgaaatcattgcggtataagccgatatgcccgggaacatagggataacggccgccacggtaaacactttcggatgcgccagataccagcgcgaccattgaataccaatggtgccgaccagcatagaagccataaaagttgaccactcaatattcagcccgctggtcattaagatcattcgtgaaccatggccaatcgcgccaagcagcgcacaccagcgtaacgcccgcacgggaacgttgaacaccatcgcaaagccgaccgctggaatggcggcgaggatcatatcctgcgccaatgcaaacagaaactcgatcacacccatccgcgtagcccccaaatcgtcagtgccatcaccacgccgacgcaggtagccagcgtcagcagactggcgatcgcccagcgtgccagtccggtattgatgtggcctttaaacatatcggcgacggcattaatcaacggaaagcccggcaccagcagcagaacgctggcggccatcgcaatggtgggtgtatcgctgaaagtggggagttgcaaaagcaatccggaaatggtggtggcggcgaaagcggtaaggcaaaagttgatctgtggatgaagatgacgttgtgccagcagctggcggatatacatcgcggtcgtactggcaaagaaggtgatgacggcaccatcccagccaccgttattgagtttacagaaacaggcgcaagaaaggccaaccattaaggctaccagccatcttgggtaacgtaatggctgaatttggctaaatcgtttctctacgcctttgtaatccagcagatgatgctccgcaagaatcacaatgtgctggacttcagtcaccacatgcatattaatgccgcgatcgtgattttttcgtgtcgatgtcaggcattgcccatctttaatagttgtcagcactatggcgttcgaagagatagaactttcgacgctgtccattcccaacgcccgacccagtcgtgaggaaagctcatcaaccaacgcgctttccgcaccatgttgcaaaagaaataatccacactggatacaaagccgcgttacggctcgctgttgctcagtttgcataactcgccctttgtcatagacgtgctgcgtattgttcagataatgagaatccatttgtatcatgaagcacggttgttttgaggtaggttaagatcaaaattgcgctgattaatcctggttatcgggacaagctcggtgataaaaagcgaattatctctcgccgcaaacaaactatcacatgaatattatcactataatgaatttattgttttagcctttacgggtcaggataatagatagctgggcgcgtttttttatgttaacaagttaaaatcatcagattttattgaataaatattgattgtgtgattcccgcattctgcgggaagggatatcatttaattataaattaaatgaatgtgatttctgtttttcattaagtattcctaacaacttaatgtagatattttaaatgtctccaggctatttcaccaggttatcatttgatgctaaccttctgacacatgcagtggagttgttgtgcagcaggagtatgctgatatgaaagtgaatgctaaggataatttattcgcttaatctattaatttgctggaaacatttaaggaatgaatatcctgaataaaccatcataatttttagacagtggatgtggaggaaatatgttgccaggatgctgcaaaaatggaattgttatcagtaaaatacctgttatgcaagcagggttaaaagaggtcatgaggactcacttccctgaatatgaaataatatccagcgcctctgcggaggaccttaccttattacaattacgtcgttccggattagtcattgctgatttagccggtgaaagtgaagatccacgttctgtttgtgaacattattattctttaatctcacaatatcgggaaattcactgggttttcatggtgtcacgctcctggtattcccaggcagtagaactgctcatgtgccctacggcgacgttattgtctgatgttgaacccattgagaatctggtcaagaccgtacgttccggcaatacgcacgcagagcgtatcagcgccatgctgacctctccggcaatgactgaaactcatgattttagctatcgctccgtcattctcactctttcagagcgcaaggtactgcggctattaggtaaaggatggggcatcaaccagatagcttcattgcttaagaaaagtaataaaactatcagcgcccaaaaaaacagtgcgatgcgtcgactggcaattcacagcaacgctgaaatgtatgcatggataaatagcgcgcagggtgcaagagaacttaacttgccttctgtttatggagatgccgcagaatggaacacagccgaattaagaagagaaatgtcgcactcatagaaaaatgcgtcatgagtagtatcggtattgagagtttattcagaaagtttgcgggcaacccttataagctccatacctataccagtcaggagtcatttcaggatgccatgtcgcggatctcgtttgcggcggtcattttttctttttctgccatgagaagtgagcgcagagagggattatcttgcctgactgaactggcgattaagtttccgcgtacccggcgtttagttattgcggatgatgatattgaagctcagctgattggttcattgtcgccatcaccgctggacggtgtattaagtaaagcgtcaacgctggagatttttcatcaggaactctttttgtcattaaatggtgtacgtcaggcgaccgaccgactgaacaatcagtggtacattaaccaaagccggacgctaagcccgacggagagagaaatattgcgctttatgtcgcgtggctactcaatgacacaaattgccgagcagcttaaacgcaatatcaaaacgatccgcgcgcataaatttaatgtgatgtcgaaactgggcgtcagttctgatgcaggattgttggaggccgcagatattctgttatgtatgcggcattgcgaagcaagtaatgtgttgcatccctattaatccgcatgatgccgggtttacttccccggcagtgctttcatttcagcgtacaatcgccacattgctgcacatccggtaagcgataacgctggcagcaagtgcggcgcaccagcaggccgtcgcgcagtaccacggtacgccagagtggattatcttcaccgttcgtgagcgttttctcaaaaaagatggcatggcgcagcgattcaaccgtcgcctcgccgagcagttgcttcatctcagtgagataccagttgatcaaataaccggtattactccagataagtttgccgttgatctctccggtcgcttctagtgcctgcacaaccggaaccagcgcctggctgattaacgtttccattcgctgctgcggcgaatgtggtgttgcgtttttatcgtcacacacatcgacccagaaacaggcggcacggccggtttcgtgaaactcagcatggaaatgttccggcgacacatctaatgctttttcctgcgtcagtagcgccagcattaatggtggcaccatcaggccgatataccattgtgcccatagtgagatcagcggtttgttctcgcggatcatcgttggttggttgcgatagatatgatcggaatagaccgcgagtagagaacttagcgcattcggtgatgaccattgcgccagcgtcatggcgttaagcggagcgggttcatccaggcggataaactcgagcaaatgttcacgatgtttggcgatcgtcgcacgtacggcttgtgcaagcccagcatcctgtggctggagatgcgttcgccagataacatcttcatagagcggtgcggaacgataggccataatcgggatagtaatctaaatgataatgattgctaatcctagcgataggtttatccgatagcaagggatttctctggcttgcaaatgataaaaattatcatatgatattggttatcattatcaatgaaagagatgaaaccatgttgcaacgtacgctgggcagtggctggggagtgttgctgccaggattgctgattgcagggctgatgtatgcggatttatcgcctgatcaatggcggattgtcattctgatgggattagtattgacgccggtgatgctgtatcacaaacagttacggcattacgttttgctaccatcgtgcctggcgcttattgctggcatcatgctgatgataatgaatttgaatcagggatgaaaaatcaaggaagaaacaagaaaggaagtaaagataattggtgcgaggggggggacttgaacccccacgtccgtaagaacactaacacctgaagctagcgcgtctaccaattccgccaccttcgcacagtcatcttactttttttgatatcgcctcgtttggtgcgaggggggggacttgaacccccacgtccgtaagaacactaacacctgaagctagcgcgtctaccaattccgccaccttcgcccagtgcgagcaatatcaacgtggtttttggtgcgaggggggggacttgaacccccacgtccgtaaggacactaacacctgaagctagcgcgtctaccaattccgccaccttcgcataccatcaattcttaaaaagaattgctaccacggaggcgcattctagtggttttcagcttttcgtcaatagttaattatcggcagatgtgtaattgctggaaaaatgtccatcaggagactaacgagcaggttttgtaggtcggataaggcgttcacgccgcatccgacacggtattcgggggcagatgccagatgccacgctggcgcgtcttatctggcctacgaaggattaatgtgcagttgtataaggcgagcacgccgcatccgacaaggcttgcggcgggatactcaacctttcttcgcctggcgggtcataatggcgcgatacaccttgaagcgcccggtttgcgcgataacttcatggaagccaaatgtctcatccagcacgtccgggtaaggcaggaaggcgttcgctacaattcgcagctcgccgccgctattaagatgacgcaccgcgccgcgaatcagcgtttgcgccgcatccaggctggtttgcatcccatcgtggaacggcgggttggagatgatcatatcaaaacgacctttcacctcggaaaagacgttgctggcaaagacttcaccttcaacaccgttggccgcaagcgtcgcacggctggcttctaccgccggggcagagacatcgcacaaggtgagacgaattttcggtgaatggcgcgcaaaggcaactgaaagcacacccgcgccacagccgacatccagcactttacctttcgtgtgcggggttaacgtcgagagtagcaactggctaccgacatccagaccgtcgcggctaaacacgccaggcagcgttttgaccgtcaggccatcgacgctgtattcgccccagaatttatcggcatcaaataccggctgtttttccagacgaccaaaatagaggccacagcgacgagcgctgtcgactttattcaacggcgcataatctgccagcatctgctcggcgctgcgcacgccgctgcggttctcgccaacgacaaaaatatccgtccccaccggcagcagagaaagtaaattcatcaactggaactgggcttccggtttgttcttcggccagtagtaaatcagcgtatcgcaatctgcgacgtcatccgccgtggcgaccagactgaaacgggcgttatcccccatctggcggcttaatacctgccagtggtggaattgctgggtatgagcacggctggccgcggtatctaaacgcgcgggcaggtcatcctgtaagtctccggcaaacagaatacggctttgttcgaaatcatcactgtgacgcagcaagacttcacttgccggggtaaatgcagacatggaatgctcctcaattgatactggcggcgattatagccatatgttggcgcggtatcgacgaatttgctatatttgcgcccctgacaacaggagcgattcgctatgacatcccgacgagactggcagttacagcaactgggcattacccagtggtcgctgcgtcgccctggcgcgttgcagggggagattgccattgcgatcccggcacacgtccgtctggtgatggtggcaaacgatcttcccgccctgactgatcctttagtgagcgatgttctgcgcgcattaaccgtcagccccgatcaagtgctgcaactgacgccagaaaaaatcgcgatgctgccgcaaggcagtcgctgcaacagctggcggttgggtactgacgaaccgctatcactggaaggcgctcaggtggcatcaccggcgctcaccgaattacgggcaaacccaacggcacgcgccgcgttatggcaacaaatttgcacatatgaacacgatttcttccctcgaaacgactgatttaccagcggcttaccacattgaacaacgcgcccacgcctttccgtggagtgaaaaaacctttgccagcaaccagggcgagcgttatctcaactttcagttaacgcaaaacggcaaaatggcggcgtttgcgattacgcaagtggtgctggatgaagctacattgttcaatattgcggtcgatcctgactatcagcgtcagggattgggaagggcgctgctggaacatctgatcgacgaactggaaaaacgcggcgtggcgacactatggctggaagtccgtgcttcaaacgctgccgccattgccctgtacgaaagtttaggctttaacgaggcgacgattcgccgcaattactaccccaccacggacggtcgcgaagacgccatcatcatggcgttgccaatcagtatgtaagacaaggtggaataatgaagtgggactggattttctttgatgccgatgaaacgctgtttacatttgactcattcaccggcctgcagcggatgtttcttgattacagcgtcacctttaccgctgaagattttcaggactatcaggccgttaacaagccactgtgggtggattatcaaaacggcgcgatcacttcattacagcttcagcacgggcgttttgagagctgggccgaacggctgaaagttgaagcaggcttgcttaacgatgcctttattaatgcgatggcggaaatctgcacgccgcttccgggggcggtttccctgcttaacgccattcgtggcaacgctaaaatcggcatcatcaccaacggctttagcgccttgcagcaagtgcgtctggaacgcacgggcctgcgtgattacttcgatttgctggtgatttccgaagaagttggcgttgccaaaccgaataagaaaattttcgattatgcgctggaacaggcgggcaatcctgaccgttcacgcgtgctgatggttggcgacactgccgagtccgatattctcggtggcatcaacgccgggcttgcgacctgctggctgaatgcgcaccatcgcgagcaaccagaaggcatcgcgcccacctggaccgtttcttcgttgcacgaactggagcagctcctgtgtaaacactgattgcctcccccccgttgatgggtaaaatagccgcaatttttcgttttcaacaagcgcggcgcgatgccgcttactcaagaagaaagaattatgacgttgtctccttatttgcaagaggtggcgaagcgccgcacttttgccattatttctcacccggacgccggtaagactaccatcaccgagaaggtgctgctgttcggacaggccattcagaccgccggtacagtaaaaggccgtggttccaaccagcacgctaagtcggactggatggagatggaaaagcagcgtgggatctccattactacgtctgtgatgcagtttccgtatcacgattgcctggttaacctgctcgacaccccggggcacgaagacttctcggaagatacctatcgtaccctgacggcggtggactgctgtctgatggttatcgacgccgcaaaaggtgttgaagatcgtacccgcaagctgatggaagttacccgtctgcgcgacacgccgatcctcacctttatgaacaaacttgaccgtgatatccgcgacccgatggaactgctcgatgaagttgagaacgagctgaaaatcggctgcgcaccgatcacctggccgatcggctgcggcaagctgtttaaaggcgtttaccacctttataaagacgaaacctatctctatcagagcggtaaaggccacaccattcaggaagtccgcattgttaaagggctgaataacccggatctcgatgcagcggtcggtgaagatctggcacagcagctgcgtgacgaactggaactggtgaaaggcgcgtctaatgagttcgacaaagagctgttccttgcgggcgaaatcactccggtattcttcggtactgcgctgggtaacttcggtgtcgatcatatgctggatggcctggtggagtgggctcctgcgccgatgccgcgtcagactgatacccgtaccgtagaggcgagcgaagacaaatttaccggcttcgtatttaaaattcaggccaacatggacccgaaacaccgcgaccgcgtggcgtttatgcgcgtggtatccggtaaatatgaaaaaggcatgaagctgcgccaggtgcgcactgcgaaagatgtggtgatctccgacgcgctgacctttatggcaggtgaccgttcgcacgttgaagaagcatatccgggcgatatcctcggcctgcacaaccacggcaccattcagattggcgacacctttacccagggtgagatgatgaagttcaccggtattccgaacttcgcgccagaactgttccgtcgcatccgcctgaaagatccgctgaagcaaaaacagctgctcaaagggctggtacagctttccgaagagggcgcggtgcaggtgttccgtccaatctccaacaacgatctgatcgttggtgcggttggtgtgctgcagtttgatgtggtggtatcgcgcctgaagagcgaatacaacgttgaagcagtatatgaatcagtcaacgttgccaccgcccgctgggtagaatgtgcagacgcgaagaaattcgaagagttcaagcgtaagaacgaaagccaactggcgcttgatggcggcgataacctcgcttacatcgctaccagcatggtcaacctgcgcctggcgcaggaacgttatccggacgttcagttccaccagacccgcgagcattaattcttgcctccagggcgcggtagccgctgcgccctgtcaatttcccttccttattagccgcttacggaatgttcttaaaacattcacttttgcttatgttttcgatgatattccgagcggtttcaaaattgtgatctatatttaacaaagtaatgacatttctgacggcgttaaataccgttcaatgcgtagatatcagtatctaaagccgtagattgtcattctaccgatattaataactgattcagaggctgtaatggtcgttattcatcacccatcgcttttgtgatggcgaccattgacttctgtagagggtgaagtctctccctattcagcaatgcaacctcgtgttgccaggctcaaattacgagcaaacttacaggaataaatcgatgactatgacaagactgaagatttcgaaaactctgctggctgtaatgttgacctctgccgtcgcgacaggctctgcctacgcggaaaacaacgcgcagactaccaatgaaagcgcagggcaaaaagtcgatagctctatgaataaagtcggtaatttcatggatgacagcgccatcaccgcgaaagtgaaggcggccctggtggatcatgacaacatcaagagcaccgatatctctgtcaaaaccgatcaaaaagtcgtgaccctgagcggtttcgttgaaagccaggctcaggccgaagaggcagtgaaagtggcgaaaggcgttgaaggggtgacctctgtcagcgacaaactgcacgttcgcgacgctaaagaaggctctgtgaagggctacgcgggtgacaccgccaccaccagtgaaatcaaagccaaactgctggcggacgatatcgtcccttcccgtcatgtgaaagttgaaaccaccgacggcgtggttcagctctccggtaccgtcgattcccaggcacagagcgaccgtgctgaaagtatcgccaaagcggtagatggtgtgaaaagcgttaaaaatgatctgaaaactaagtaattcgtcgtaattcgtcctcccgaactttgtcgggaggcgcgatgtgcaccacactaaaaatatcgcattgagtgattttcacgctcatatcaagcggtgacattaactatggtaaaggagacgcttatgtttcgttggggcatcatatttctggttatcgcgttaatcgccgccgcacttgggtttggtggtctggccggtaccgctgcaggcgcagctaaaattgtctttgtcgtcgggattattctgttcctggtgagtttgttcatgggccgaaaacgaccctagatttcagaccattaagaaaattttatccaaagccagtccagcggactggcttttgcggttttagcgaataataaattgcgttactttgtcattctttcacaacaaaaacaggaaggcagaggtggggcagcgaatacctgtaacgcttggtaatattgcgccgttgtcgctaaggccgttccagcctggacgaatagctctggtgtgcgaaggcggcggacagcgtggaattttcacggctggcgtgctggatgagtttatgcgcgcgcagtttaatcctttcgatctttatctcggcacatctgccggggcgcagaacctctcggcgtttatctgcaatcagcccggttacgcgcgcaaagtcatcatgcgctataccacaaaacgcgaatttttcgatccattgcgctttgtccgtggaggaaatcttatcgatctcgactggctggtggaggccaccgcaagccagatgccgttgcaaatggataccgccgcgcggttgtttgacagcggcaaatcgttttatatgtgcgcctgtcgtcaggatgactacgcgcctaattactttttaccaaccaaacaaaactggctggatgtgattcgcgcctccagtgcgatacctggcttttatcgtagcggagtgtcgctggaaggcattaactacctggatggcgggatcagtgatgcgattccggttaaagaggcggcaaggcagggcgctaaaacgttggtcgtcatccgcactgtgccgtcacaaatgtactacacgccgcagtggttcaaacgcatggaacgctggctgggtgacagtagcctgcagccgctggtcaatctggtgcagcatcatgaaaccagctatcgtgacattcagcaatttattgagaaaccaccgggcaagctgcggatattcgaaatttatccaccgaaaccattacatagtatcgcgcttggcagtcggattccggcgctgcgtgaagactataaacttgggcgtttatgcggtcgttatttcctcgccacggttggcaagctattaactgaaaaagcgccgcttacccgccatctggtgccagtggtgacgccggaatcgatcgttattccgcctgcgccagtcgccaacgatacgctggttgccgaagtgagcgatgctccgcaggcgaacgacccgacatttaacaatgaggatctggcttgatttgccgttttatcgatacccactgccattttgatttcccgccgtttagtggcgatgaagaggccagcctgcaacgcgcggcacaagcgggcgtaggcaagatcattgttccggcgacagaggcggaaaattttgcccgcgtgcaggcgttagcggaaaaatatcaaccgctgtatgccgcattggggttgcatccggggatgttggaaaaacatagcgatgtgtctcttgatcagctacagcaggcgctggaaaggcgtccggcgaaggtggtggcggtgggggagatcggtctggatctcttcggcgacgatccgcaatttgagaggcagcagtggttactcgacgaacagctgaaactggcgaaacgctacgatctgccggtgatccttcattcccggcgtacacacgacaaactggcgatgcatcttaaacgtcacgatttaccgtgcactggcgtggttcacggtttttccggcagcctgcaacaggccgagcggtttgtacagctgggctacaaaatcggcgtaggcggtactatcacctatccacgcgccagtaaaacccgcgatgtcatcgcaaaattaccgctggcatcgttgttgctggaaaccgacgcgccggatatgccgctcaacggctttcaggggcagcctaaccgaccggaacaggctgtgcgggtgtttgacgtgctttgcgagttgcgcccggaaccagaagatgagattgccgaagtgttgcttaataatacgtatgcgttgtttagcgttagtgggtagtttacccttcgtgcatccggcagtcggcgcataatgcctgatgcgacgctgtcgcgtcttatcatgcctacaagtctgtgccgaaccgtaggccgaggcagcatccggcagtcggcgcataatgcctgatgcgacgcttgtcgcgtcttatcatgcctacaagtctgtgccgaaccgtaggccgtatccggcatgtcacaaatagagcgccggaaatatcaaccggctcaccccgcgcacctttaacgcatcagccaacggctcaacgtcttccggcgtggcgctcgcccagctttgcgcctcgccatacacgccgtgggcatgaaacgcgttcaggcgtaccggaacatcgccaagtcccttgataaacaccgccagttcttcgatgtgttgcaaataatccacctggccagggattaccagcaaacgcagttccgccagcttaccgcgctctgccagcaaacagatgctgcgcttaatctgctgattatcgcgtccggttaattgttgatgacattcgctcccccacgctttgagatcgagcattgcgccgtcacacaccgggagtaatttttcccagccggtttcgctcaacataccgttactgtccacgaggcaggtgaggtggcgcagttgcggatcgtttttgatggctgtaaacagcgccaccacaaacggcagctgggtcgtggcttcgccgccgcttaccgttatcccttcgataaacagcaccgctttgcggatatggctaagcacctcatccacgctcatggattgcgccattggcgtggcatgttgcggacacatcttcaggcaggtatcacactgctcgcagaccacagcgttccacagcactttgccgtcaacaatctgcaacgcctgatgcggacactgtggcacgcactctccgcaatcattgcagcgtcccatcgtccacggattgtgacagtttttgcagcgcagattgcagccctgcaaaaacagagccagacgactgcctggcccgtcaacgcaggagaaggggataatcttactgactaaagcgcatctgctgttcatggcttatcacgcgcggctggcgttccagaatacgagtgttgcgtgcggcttcttcgcccagccaggtggtgttggtgcgtgaaccttcggcgcgatatttttctaaatccgacaaacgcaccatataaccggtaacgcgaaccagatcgttaccgctgacattggcggtaaattcacgcattccggctttaaaggcaccgaggcaaagctgtaccagtgcctgcgggttacgtttgatggtttcgtcgagggtcagaatgtcgctgatgccggaataataataagcatgatgcggggcgacagtttgcagatgggtgatcggatctggctcatcgccatacggcaaacgcgcgcccggcgtggtgccgatatcggaactgatccccgactgtgcgtgtaacatggcgcgtttttgccagccatatttcacgggggtattggcgacaaactccgccagttgcgcgctgatgcgataacccacttcatttgcggcggcttctttaccgtagcgcgcggcaatcccttctttctcacacagcaagttaaccgcttccgccagcccatacatgccaaacattggcacaaaacgttcagggttaatcagcccttctttcaccaggaagctattctcaaagaagtgtgattgttgatagaggaattcacaccgcgcatcgatgatggcgatctgctgctggcagtagtgcggtagagtgcgcgtaaagaagtcatccagcgattcgctgcgctcggcaatggctttcaggttaaggcgtaccagcgtgctgccaccacccgccagcggcagtgagttgtaacagctcacaatcccgtagcccccttttgtgaaaattttatcatgcaccggaccgttggcgatgtgcggtttgctacattcacagatgttcttcgccacttccagcagcaggtcatcaggggtgatttctggatcgtagataaaggtcaggttcggtgaaacctgcttcaactctgcatctgcacgtaatatcgcacgggtgatgggcgaatcagacgggccgatattggcgtgcataaaggcgtctggcagggttctgtcgaggtaacgccagaaacgttttattcgaatatcgatctcgtcttgtgttagaattctaacatacggttgcaacaacgcatccagttgccccaggtagaccggcatcgatgtgaccgacggtacgtggtggtaaagaatggtcagcagagagagtgcgtcatcaagatctttcgcgccttccagctccagccattcggaaccgttcgccagaaaacgggcgtaatcgggtaagacatagcgcggtttgtacggcgcatgaccttcaaacatatcgcagattacaccctcatccagcgcgcggcgggcctcggcaggcagctgcggataaggcagattgttttctgcttccagtgccagaaaatggcgcttctgctccgggctaagcactgggctggtgacaatttgctggcaacgttgttgcagtgcattttcatcagaagtgggcatcttcttttccttttatgccgaaggtgatgcgccattgtaagaagtttcgtgatgttcactttgatcctgatgcgtttgccaccactgacgcattcatttgaaagtgaattatttgaaccagatcgcattacagtgatgcaaacttgtaagtagatttccttaattgtgatgtatatcgaagtgtgttgcggagtagatgttagaatactaacaaactcgcaaggtgaattttattggcgacaagccaggagaatgaaatgactgatctgaaagcaagcagcctgcgtgcactgaaattgatggacctgaccaccctgaatgacgacgacaccgacgagaaagtaattgctctgtgtcatcaggccaaaaccccggtcggcaataccgccgctatctgtatctatcctcgctttatcccgattgctcgcaaaacgctgaaagagcagggcaccccggaaatccgaatcgctacggtaaccaacttcccacacggtaacgatgacatcgaaatcgcgctggcagaaacccgtgcggcaatcgcctacggtgcagatgaagttgacgttgtgttcccgtaccgcgcgctgatggcgggtaacgagcaggttggttttgacctggtgaaagcctgtaaagaggcttgcgcggcagcgaatgtactgctgaaagtgatcatcgaaaccggcgaactgaaagacgaagcgctgatccgtaaagcgtctgaaatctccatcaaagcgggtgcggacttcatcaaaacctctaccggtaaagtggctgtgaacgcgacgccggaaagcgcgcgcatcatgatggaagtgatccgtgatatgggcgtagaaaaaaccgttggtttcaaaccggcgggcggcgtgcgtactgcggaagatgcgcagaaatatctcgccatcgcagatgaactgttcggtgctgactgggctgatgcgcgtcactaccgctttggtgcttccagcctgctggcaagcctgctgaaagcgctgggccacggcgacggtaagagcgccagcagctactaagtaagatgctttacgcctgatgcgctgcgcttatcaggcctacgagacgtatctacccgtaggccggataaggcgtagacgcatccggcaaaagccgcctcatactcttttcctcgggaggttaccttgtttctcgcacaagaaattattcgtaaaaaacgtgatggtcatgcgctaagcgatgaagaaattcgtttctttatcaacggtattcgcgacaacactatctccgaagggcagattgccgccctcgcgatgaccattttcttccacgatatgacaatgcctgagcgtgtctcgctgaccatggcgatgcgagattcaggaaccgttctcgactggaaaagcctgcatctgaatggcccgattgttgataaacactccaccggcggcgtcggcgatgtgacttcgctgatgttggggccgatggtcgcagcctgcggcggctatattccgatgatctctggtcgcggcctcggtcatactggcggtacgctcgacaaactggaatccatccctggcttcgacattttcccggatgacaaccgtttccgcgaaattattaaagacgtcggcgtggcgattatcggccagaccagctcactggctccggcagataaacgtttctacgcgacccgcgatattaccgcaaccgtggactccatcccgctgatcactgcctcgatcctggcgaagaaactggcggaaggtctggatgcgctggtgatggacgtgaaagtgggtagcggcgcgtttatgccgacctacgaactctctgaagcccttgccgaagcgattgttggcgtggctaacggcgctggcgtgcgcaccaccgcgctgctcaccgacatgaatcaggtactggcctccagtgcaggtaacgcggttgaagttcgtgaagcggtgcagttcctgacgggtgaatatcgtaacccgcgtctgtttgatgtcacgatggcgctgtgcgtggagatgctgatctccggcaaactggcgaaagatgacgccgaagcgcgcgcgaaattgcaggcggtgctggacaacggtaaagcggcagaagtctttggtcgtatggtagcggcacaaaaaggcccgaccgacttcgttgagaactacgcgaagtatctgccgacagcgatgctgacgaaagcagtctatgctgataccgaaggttttgtcagtgaaatggatacccgcgcgctggggatggcagtggttgcaatgggcggcggtcgtcgtcaggcatctgacaccattgattacagcgtcggctttactgatatggcgcgtttgggcgaccaggtagacggtcagcgtccgctggcggttatccacgcgaaagacgaaaacagctggcaggaagcggcgaaagcggtgaaagcggcaattaaacttgccgataaagcaccggaaagcacaccaactgtctatcgccgtatcagcgaataacggtatactgatctgatcatttaaatttgaagcactgagtacggagaacatatgaaacgtgcatttattatggtgctggactcattcggcatcggcgctacagaagatgcagaacgctttggtgacgtcggggctgacaccctgggtcatatcgcagaagcctgtgccaaaggcgaagctgataacggtcgtaaaggcccgctcaatctgccaaatctgacccgtctggggctggcgaaagcacacgaaggttctaccggtttcattccggcgggaatggacggcaacgctgaagttatcggcgcgtacgcatgggcgcacgaaatgtcatccggtaaagataccccgtctggtcactgggaaatcgccggtgtcccggttctgtttgagtggggatatttctccgatcacgaaaacagcttcccgcaagagctgctggataaactggttgaacgcgctaatctgccgggttacctcggtaactgccactcttccggtacggtcattctggatcagctgggcgaagagcacatgaaaaccggcaagccgattttctatacctccgctgactctgtgttccagattgcctgccacgaagaaacctttggcctggataaactctacgaactgtgcgaaatcgcccgtgaagagctgaccaacggcggctacaacatcggtcgtgttatcgctcgtccgtttatcggtgacaaagccggtaacttccagcgtaccggtaaccgtcacgacctggctgttgagccgccagcaccgaccgtgctgcagaaactggttgatgaaaaacacggtcaggtggtttctgtcggtaaaattgcagacatctacgccaactgcggtatcaccaagaaagtgaaagcaactggcctggacgcgctgtttgacgccaccatcaaagagatgaaagaagcgggtgataacaccatcgtcttcaccaacttcgttgacttcgactcttcctggggccaccgtcgcgacgtcgccggttatgctgcgggtctggagctgttcgaccgccgtctgccggagctgatgtctttgctgcgcgatgacgacatcctgatcctcactgctgaccacggttgtgatccgacctggaccggtactgaccacacgcgtgaacacattccggtactggtttacggcccgaaagtaaaaccgggttcactgggtcaccgtgaaaccttcgcggatatcggccagactctggcaaaatattttggtacttctgatatggaatatggcaaagccatgttctgatggatttgggcggagcgttgactccgcctttgttatgtcacaaaaaggataaaacaatggctaccccacacattaatgcagaaatgggcgatttcgctgacgtagttttgatgccaggcgacccgctgcgtgcgaagtatattgctgaaactttccttgaagatgcccgtgaagtgaacaacgttcgcggtatgctgggcttcaccggtacttacaaaggccgcaaaatttccgtaatgggtcacggtatgggtatcccgtcctgctccatctacaccaaagaactgatcaccgatttcggcgtgaagaaaattatccgcgtgggttcctgtggcgcagttctgccgcacgtaaaactacgcgacgtcgttatcggtatgggtgcctgcaccgattccaaagttaaccgcatccgttttaaagaccatgactttgccgctatcgctgactttgacatggtgcgtaacgcggtagacgcggctaaagcactgggcgttgatgctcgcgtgggtaacctgttctccgctgacctgttctactctccggacggcgaaatgttcgacgtgatggaaaaatacggcatcctcggcgtggaaatggaagcggctggtatctacggcgtcgctgcagaatttggcgcgaaagccctgaccatctgcaccgtgtctgaccacatccgcactcacgagcagaccactgccgctgagcgtcagaccaccttcaacgacatgatcaaaatcgcactggaatccgttctgctgggcgataaagagtaattgtgtttcgctgaaaggcgaacgtcgtgttaagccggagcaggagactgctccggctttttagtatctattcatcaatagcaactgatttatagatttactattatttttcatatggatagaaaataaaatccattcaagtatctattcacgaatctattcatttatgttcagccgtcatccaggaagggcatatcagcaactctggtggacaaccataaatttctgccattttgcttttgatgtttgagctaagccgttccgtcttttcgatctgttttagagaattaatcgagatacctaacattttacttacttcagcaagcgataatttatgcctgatacgcacggcggctagccaggaaatacgctggcttaacattaaattgataatctcccgctcctggttttccagatcgatcatattcccttcctttggtattttaatcagcgagttaccttaccgcccccgctatccacgtcgacaactcccgtagctctttttcctggtccgggaagtcaaccaacagcgcttcgcactcttgttgcagcatatccgcgcggtacaggcagccttgcagtcgcccggcgagggcttccagcggcgcggggttgaggctgtcggtaaacacctgggcgcgggtgatatggcctttttcaacgtcgaaatgcagttccacgccgccccagctaaagcgttcatccagcagatgcgagaatgccggagcctgaccgaagttccattcccagctactctgacgggcaaaggtttcggcgaagtttggcaagtctggcgttttgtccggggagatgatttccgcttctacacgctcgccataatgggcgaaaaaggcctctcgtatgacctcgcaaacctgctcatgggtgatccccggcagcagctcggtgaggttggtcacgcgggaacgcactgaggtaatgcctttcgccgccagtttctttttatccggattgagatagtttgccaggcggctaaggtcggcattgagcagcaaagtgccgtggtggaagccacgatctttggtttcgcgataggccgagcctgagactttgcggtcgccttcgactgttttcaccaccagatcgttacgcccggacgcttcggcgctgacgccgagcgcgttcagcgcattgagcacaatcgacgtagagatggttttatcgtactccggcttgccagccataaaggtaaagcaggtattgccgagatcgtggaacaccgcgccgccaccgctactgcgccgcgccaggcggacgttatcttcttccatccgccgggtattacactctttccacgggttctgcgcgcgaccaatcactaccgtgtcggcattgcgccagagaaacagaacgcgctgcgtggcgggcatttggcgaaaaatacactcttccaccgccaggttaaaccacgggtcgtaagagtcagagatgagcaggcgtaatgtggacataacgatttcctttcttgtagtaatgggtcactcttttttctcgctttcttcctcttccggcaccggtttgctggcggttaacaggaagggcgattgctgccagcgggtgcgtttaccctgtagcagcgtgcgggtcagcactacgccgattgccagtgagagcagcaacatcaggcgtaaaatgttagtggtgttatccacctgttgggcttcggtggcgagcgtatgggtgtcgagtgtcaggcgcagatagccgagcggtccgtttttacccgcaattggctcgacaatctgctggttaaaatagccgcctgcttttttaccgtcgagcgccagccggtcgcgcacttcgacgctttcgcctgaacgggcgataagatcgccttgttcgtcatacacacccgcgtcgaggatgcggctttcatccgttaactgatcgaggatcgcctgaatgcgtttttcatctggtgagtcggtacgcatcagcggtgcaacgttcagcgttacctgacgcgccagggtgcgggccagttcttccagctgtggattacgttgtcgctggtggttttgactaaaccatgacgctccctgcatcagcgccactaacaaggcaagacagaacaggacaatcactgcccgatgcagccggaatttcagttttgtgcgagccatcttccaccctttgaaaatttgagacttaatgttgccagaagcaatggatacaaggtagcctcatgcgttattttccctgcttcgaacgattttacaggagccttaatgcctaacattacctggtgcgacctgcctgaagatgtctctttatggccgggtctgcctctttcattaagtggtgatgaagtgatgccactggattaccacgcaggtcgtagcggctggctgctgtatggtcgtgggctggataaacaacgcctgacccaataccagagcaaactgggcgcggcgatggtgattgttgccgcctggtgcgtggaagattatcaggtgattcgtctggcaggttcactcaccgcgcgcgctacgcgcctggcccatgaagcgcaactggatgtcgcgccgctggggaaaatcccgcacctgcgcacgccgggtttgctggtgatggacatggattccaccgccatccagattgaatgtattgatgaaattgccaaactggccggaacgggcgagatggtggcggaggtaaccgaacgggcgatgcgcggcgaactcgattttaccgccagcctgcgcagccgcgtggcgacgctgaaaggcgctgatgccaatattctgcaacaggtgcgtgaaaatctgccgctgatgccaggcttaacgcagctggtgctcaagctggaaacgctgggctggaaagtggcgattgcctccggcggctttactttctttgctgaatacctgcgcgacaagctgcgcctgaccgccgtggtagccaatgaactggagatcatggacggtaaatttaccggcaatgtgatcggcgacatcgttgacgcgcagtacaaagcgaaaactctgacccgcctcgcgcaggagtatgaaatcccgctggcgcagaccgtggcgattggcgatggagccaatgacctgccgatgatcaaagcggcagggctggggattgcctaccatgccaagccaaaagtgaatgaaaagacggaagtcaccatccgtcacgctgacctgatgggggtattctgcatcctctctggcagcctgaatcagaagtaattgcctgcccgtcatcctgcgggcggcacagcattaacgaggtacaccgtggcaaaagctccaaaacgcgcctttgtttgtaatgaatgcggggccgattatccgcgctggcaggggcagtgcagtgcctgtcatgcctggaacaccatcaccgaggtgcgtcttgctgcgtcgccaacggtggcgcgtaacgagcgtctcagtggctatgccggtagcgccggggtggcaaaagtccagaaactctccgacatcagccttgaagagctgccgcgtttttccaccggatttaaagagttcgaccgcgtattaggcggcggcgtggtaccgggaagtgccattctgattggcggtaacccaggcgcggggaaatccacgctgttgctgcaaacgctgtgcaaactggcccagcagatgaaaacgctgtatgtcaccggcgaagagtcgctgcaacaggtggcaatgcgcgctcatcgccttggcctgccgactgacaatctcaatatgttgtcggaaaccagcatcgagcagatctgcctgattgctgaagaagagcaaccgaagctgatggtaattgactccatccaggtgatgcatatggcggatgtacagtcatcgcctggtagcgtggcgcaggtgcgtgaaacggcggcttatttgacacgcttcgccaaaacgcgcggtgtggcgattgtcatggttggacacgtaaccaaagatggctcgctggcgggccctaaagtgctggaacactgtatcgactgttcggtgcttttggatggcgatgccgactcccgttttcgcaccttgcgcagccataaaaaccgcttcggcgcggtgaatgagctgggcgtcttcgcgatgaccgaacaggggctgcgtgaagtcagcaacccttcggcaattttcttaagtcgcggagatgaagtgacctccggcagctccgtgatggtggtgtgggaaggaacgcgtccgttgctggtggagattcaggcgctggtcgatcactcgatgatggcgaatccgcgccgcgtggcggtaggtctggagcaaaaccgtctggcaatcctgctggctgtcttgcaccgtcacggtggtctgcaaatggccgatcaggatgtatttgtgaacgtggtcggtggtgtgaaggtaaccgaaaccagtgccgacttagcgttactgctggcgatggtttccagcctgcgtgacagaccgctaccgcaggatctggtggtgtttggtgaagtcgggctggcaggggagatccgcccggtgcccagcggtcaggagcgaatctctgaagcggcgaaacacggttttcgccgggcgattgttccggcggctaacgtgccgaaaaaagcgccggaagggatgcagatttttggcgttaaaaaactctccgacgcgcttagcgtgttcgacgacttataatgagagatacggagggagatatgtcgtcatttgattacctgaaaactgccatcaagcaacagggctgcacgttacagcaggtagctgatgccagcggtatgaccaaagggtatttaagccagttactgaatgccaaaattaaaagccccagcgcgcaaaagctggaggcgttgcaccgttttttggggcttgaatttccccggcagaagaaaaccattggtgtcgtattcggtaagttctacccgctgcataccggacatatctaccttatccagcgcgcctgtagccaggttgacgagctgcatatcattatgggttttgacgatacccgcgaccgcgcgttgtttgaagacagcgccatgtcgcagcagcccacggtgccggatcgtctgcgctggttattgcaaacttttaaatatcagaaaaatattcgcattcatgctttcaacgaagagggcatggagccgtatccgcatggctgggatgtgtggagcaacggcatcaaaaagtttatggctgaaaaggggatccagccggacctgatctacacctcggaagaagccgatgcgccacagtatatggaacatctggggatcgagacggtactggtcgatccgaaacgtacctttatgagtatcagcggtgcgcagatccgcgaaaacccgttccgctactgggaatatattcctacggaagtgaagccgttctttgtgcgtaccgtggcgatccttggcggcgagtcgagcggtaaatccaccctggtaaacaaacttgccaatatcttcaataccaccagtgcgtgggaatatggtcgcgattatgtcttttcacacctcggcggtgatgagatcgcattgcagtattccgactacgataaaatcgcgctgggccacgcacaatacattgattttgcagtgaaatacgccaataaagtggcgtttattgacactgattttgtcactacccaggcgttctgcaaaaagtacgaagggcgtgagcatccgttcgtgcaggcgttgattgatgaataccgtttcgatctggtgatcctgctggagaacaacacgccgtgggtggcggatggtttacgcagcctcggcagttcggtggatcgcaaagagttccagaacttgctggtggagatgctggaagagaacaatatcgaattcgtgcgggttgaagaggacgattatgacagccgtttcctgcgctgcgtggagctggtgcgggagatgatgggggagcagagataaccgcgatgaaacggctcaaaggcgaggtataaaataagtttttttgatgagttgaaaacctttctggaagaggctgtcgagattaaacaaggtttgaaaaaacctgcacgggtgacccgctacgaaattgcggatactaaggctgttgtaggccggaaaaggcgttcacgccgtatccggcattcggtgctcaatgcctgatgcgacgcttaccgcgtcttatcaggcctggagattcacaacgtattgaaatttcttggtttgtaggccggataaggcgttcacgccgcatccggcattttacgcattacttcgcaatacgcttgtacttgatacgcttcggctccagtgcgtctgcgcccagcgtgcgtttcttgtactcttcgtactcagtaaagttaccttcgaagaactcaactttaccttcatcctggtagtccaggatgtgcgtggcgatacggtcgaggaaccaacggtcgtgcgagataaccatcgcacagcccgggaactccagcagggcgttttccagcgcgcgcagggtttcgatatccaggtcgttggttggttcgtcgagcagcagcatgttgccgccaacctgcagcagcttcgccagatgcagacgaccgcgctcaccaccggaaagttcaccaacgcgtttaccctgatcaacccctttaaagttaaagcggccaacgtaggcgcggcttggcatctcggtgttgccgatcttcataatatccagcccgccggaaacttcttcccaaacggttttgctgttatccattgagtcacggaactgatcaaccgatgccagtttcaccgtttcacctaaagtgatggtgccgctgtccggctgttcctgaccagagatcatacggaacagggtcgatttacccgcgccgttcggaccgatgatcccgacgattgcccctttcgggatcgagaagctcaggtcatcaatcagcaggcgatcaccgtaggatttacgcaggttgctgacttccagcactttatcgcccagacgcggtccaggtggaataaacagttcgttggtttcgttacgtttctgatattcggtgctgttcagctcttcaaagcgtgccagacgtgctttacctttcgactggcggcctttagttccctgacgtacccactccagctctttctcgatcgacttacgacgcgccgcttcttgtgaagcttcctgcgccaggcgctgatctttctgctccagccaggaggagtagttgccttcccacggaataccttcaccgcggtcaagttcgaggatccagcctgcaacgttatcgaggaagtaacggtcgtgggtaatcgccaccacggtgccctcgaagtcgtgcaggaagcgttccagccaggccacggattcggcatccaggtggttggtcggttcgtcgagcagcagcatgtctggtttttccagcagcaggcggcacaacgctacgcgacgacgctcaccaccggagaggttagcgattttcgcgtcccagtccggcagacgtagcgcatccgccgcacgctccagctgtacgttcaggttatgaccgtcgtgagcctgaatgatctcttccagacggccttgttcagcggccagcttgtcaaaatcggcatccggatcggcgtacagcgcatacacttcatccaggcgtttcagggcgttaaccacttcagaaaccgcttcttcaatggactcacgcacggtgtgttccgggttcagctgcggttcctgcggcaggtaaccaatcttgatgtctggctgcggacgcgcttcaccttcgatgtctttatcaatgcccgccataatgcgcagcagggtagacttacccgcgccgttcagacccaggacaccaatttttgccccagggaagaaactcagagagatgtttttcaaaatatgacgtttcggcggaacaactttgccgacacgatgcatggtataaacgaattgagccacgttggacttcgcctctatgtttatcgtgatgatgagttttcaaaggcgaagtgtagcctttttccccgcctaatcccagttggtcgatcaccttcgcagtaaaagtaaaaaagtgtccgtaacgtggcgtaaacggcaatgactggttagcataaatctattacgcggcatgacgctgcattgatgtatttacacttagaggatgcgcttgtggaaaaagccaaacaagttacctggcggctgttggctgccggtgtctgtctgctgacggtcagcagcgtggcgcgagccgactcactggatgagcagcgtagccgttacgcgcaaatcaagcaggcctgggataatcgacaaatggatgtggtcgaacaaatgatgcctggactgaaggattatccgctttatccctacctggaataccgccagatcaccgatgatctgatgaatcaaccggcggtgacggtcactaactttgttcgcgctaaccccacgcttcctcccgctcgcacgctgcaatctcgtttcgtcaatgaactggcgcggcgtgaagactggcgtggcttgttagcctttagcccggaaaagcccggaactaccgaagcgcaatgtaattactactatgcgaaatggaacaccgggcagagtgaagaagcctggcaaggggcgaaagagctgtggctaaccggcaagagccagcctaacgcctgtgacaagttatttagcgtctggcgtgcgtcaggtaaacaagatccgctggcttatttagagcgtatccgtctggcgatgaaagcgggtaacactggcctggtaacagtgctggcagggcagatgcctgccgattaccagactatcgcctcggcaatcatttcactggcgaacaaccctaatacggtactgaccttcgcgcgtacaaccggagcgaccgattttacccgtcaaatggcggcggtggcgtttgccagtgtggcgcggcaggatgctgaaaatgcacggctgatgatcccgtcgcttgcccaggcgcagcagcttaatgaagatcatattcaggagctgcgcgatatcgtcgcctggcgtttgatgggcaacgatgtcaccgacgagcaggcgaaatggcgcgatgacgccattatgcgctcgcaatccacgtcgttgattgaacgccgtgtgcgaatggcacttggcaccggcgatcgtcgcggcctgaatacctggctggcgcgtctgccgatggaagcaaaagagaaagatgaatggcgttactggcaggcggatttattgctggaacgcggacgtgaagctgaagcgaaagagattttgcatcaactcatgcaacagcgtggtttctacccgatggttgcagcacaacgcatcggagaagagtatgagctgaagattgataaagcgccgcagaatgttgacagcgccctgactcaggggccggagatggcgcgcgtgcgcgagttgatgtactggaatctcgataacaccgcgcgtagcgagtgggccaatctggtgaagagcaagtcaaaaacagagcaggctcaactggctcggtatgctttcaataaccaatggtgggatcttagcgttcaggcaacgatcgccgggaagctttgggatcatctggaagagcgattcccgctggcttacaacgatcttttcaaacgttacaccagtgggaaagagatcccgcaaagctatgcgatggcgattgcccgtcaggagagcgcctggaatccgaaagtgaaatcaccggtaggggccagcggcctgatgcagattatgcctggtacagcgacccatacggtgaagatgttctctattcctggttatagcagccctgggcaattgctggatccggaaacgaatatcaacattggcaccagttacctgcaatatgtttatcagcagtttggcaataaccgtattttctcctcagcagcttataacgccggacctggacgggtgcgaacctggcttggcaacagcgccgggcgtatcgacgctgtggcatttgtcgagagtattccgttctccgagacgcgcggttatgtgaagaacgtgctggcttatgacgcttactaccgctatttcatgggggataaaccgacgttgatgagcgccacggaatggggacgtcgttactgatccgcacgtttatgatatgctatcgtactctttagcgagtacaaccgggggaggcattttgcttcccccgctaacaatggcgacatattatggcccaacaatcaccctattcagcagcgatggcagaacagcgtcaccaggagtggttacgttttgtcgacctgcttaagaatgcctaccaaaacgatctccatttaccgttgttaaacctgatgctgacgccagatgagcgcgaagcgttggggactcgcgtgcgtattgtcgaagagctgttgcgcggcgaaatgagccagcgtgagttaaaaaatgaactcggcgcgggcatcgcgacgattacgcgtggatctaacagcctgaaagccgcgcccgttgagctgcgccagtggctggaagaggtgttgctgaaaagcgattgattttgtaggcctgataagacgcggcagcgtcgcatcaggcatcgtgcaccgaatgccggatgcggcgtgaacgccttatccgtcctacaatgcctgatacacggcattatgaaacggactcagcgccaggatcaccgcctggtgatagacgctggcgcgggtgagtttcccggcggtaaacacgccgatcgccccttccttacgaccaatctcatcaataccggtataacgcgacatcacggggccgagcgcctcgccttcacgcactttttccagaatcaccgcaggcaacggcaaagtagccgaacgcgcctcgccgcgctggctggcgttttcaatcaccacccaactgaaagtgctgtcaccatcgatgccagcttcaatcgccacccaaaaatcagcctctggaagtaaacggcgggcatttgctacccgatttcgtgcgccagcgcgcgtttcctcactgccaaagggttgttccggtacaccgctctcgacggcaacggatgcaatatggcaggatccttcgccgaagatctcgtgaaatgcctgcagaatggcctgaattttagcgggattggtggtcgcacagacaacttggtgcataatcagcattactcagaaaattaacgttacagcagtatacggaaaaaaagcatgttacaggtatacctagtccgccacggtgaaacgcagtggaacgccgagcgacgtattcagggccagtctgacagcccgctgaccgccaaaggtgagcaacaggcgatgcaggtggcaacccgtgccaaagagcttggcattacgcatatcatcagtagcgatttaggacgcacccggcgtacggcggaaatcatcgcccaggcctgcggctgtgacatcatctttgattctcgcctgcgtgaattaaacatgggtgtgctggaaaaaagacatatcgattctctgaccgaagaagaagagaactggcgtcggcagctggtcaatggcaccgttgacgggcgtattcctgaaggcgagtcaatgcaggagctcagcgatcgcgtcaatgcggcactggaatcttgccgggacttaccgcagggaagccgaccgctgctggtgagtcatggtattgcactgggatgcctggtgagtacgattctcggattaccagcatgggcagagcgccgcttacgtctgcgtaactgttctatttcgcgcgtggattatcaggaaagcctgtggctggcgtctggctgggttgttgaaaccgcaggggacatctcgcatctggacgcccctgcattagatgagttgcagcgttaacgacggatcggaatcagcagttcacagcgcagattaattgggcgatctcctgctttggcatcttctgccgggtagtatcgctcaatatcctgacctttacggcgcgtcaggttaagcattggcatgcatgttccatataccgtcaggataaactcctgcacgccggttcccagaccttcataggtaaacatcacatattcgccgccctgcagcatcaccggatgccccgtcagtacatagccatctgcctgatcctgggctaacgcggtggtatagaatacttcttgttcgtcgtctttatcctgactcggacgcgtttcattcaggccgtagagcaccggcggaatggtcggcgcgttgccgagaaaatcgtgccagaactgataacgcatttcatggcggaaatcagagatttgctccagcgaacaggagtagctctgggtaacaccaatcagcggcgtatcttccagggtgacaaatttgtgctctggcatagtgaattcacccagacgtagcggcgggcgaataccaaaggcgctccattcaggagaacggcggtaaagtgcaggagtctgggcaaactgcttcttgaatgcgcgggtaaatgtctgttgagagtcgaagcggtattgcagcgcgatgtccagaatcggacgcgcagtcaggcgtagtgcgaccgccgatttcgacaaacgacgagcacgaatatacgcgccaatagcatggccagtgacatctttaaacattctctgtaagtgccacttggaataacctgctttcgccgctacattgtcgagcgacaggggctgatccagatgaccttccagccagattaaaaggtcgcgaataatgccggcctgatccataaaatatcctcatcctttcaacaacgagcacctgacatcaggtaattggataatagcattttttgctgttttagcattcagtgtttttttcttagtagagtatgttttagggcttgacggaaataaaagtattgagattttgttcttaatcaatatgttatttaccgtgacgaactaattgctcgtgtaatagataaaaatggtaacaatatgaaatacaagcatttgatcctgtctttaagcctgataatgctggggccattggctcatgcagaggagattggttcggtcgacaccgtatttaaaatgatcggcccggatcacaaaattgttgtggaagcctttgacgatcccgatgtgaaaaatgtcacctgttatgtgagccgggcgaaaaccggtggtattaaagggggattgggcctggcagaagatacctccgatgcggccatttcttgtcagcaagtcgggccgattgaactgtcggatcgtattaaaaacggcaaagctcagggcgaggtagtattcaaaaaacgcacgtccctggtctttaagtcgttacaggtcgtgcgcttttatgacgccaaacgcaacgcgctcgcttatctggcttactccgacaaagttgtagaaggttcgccgaaaaacgcgattagcgcggttcctgtcatgccgtggcggcaataacagaggcgatttatgcaacgggaaacggtctggttagtggaagatgagcaagggatagccgacacgctggtctacatgttgcagcaggaaggttttgccgtcgaggtctttgagcgaggcttgccggtgctggataaagctcgccagcaggttcccgacgtcatgattctcgatgttggtttgcctgatatcagcggctttgaattgtgccgccagttactggcgctccatccggcgttacctgtactgttcctgacggcccgaagtgaagaggtcgatcgcctgcttgggctggaaattggcgctgacgactatgtggctaaaccgttttcaccccgcgaagtgtgcgccagggtgcgcaccttactgcgtcgggtgaagaagttctcgacgccgtctcccgtcatccgtattggtcattttgaattgaatgaacccgcggcgcagatcagctggtttgacacgccattaacgctgacgcggtatgagtttttattgctgaagacgttactcaagtcgccaggccgcgtctggtcccgccagcaactgatggatagcgtgtgggaagatgcgcaggacacctacgatcgcaccgtcgatacccacattaaaacgttgcgtgccaagctgcgcaccatcaaccccgatctttcaccgattaatactcatcgcggcatgggatatagcctgaggggcctgtaatgcgtatcggcatgcggttgctgctgggctattttttactggtggcggtggcggcctggttcgtactggctatttttgtcaaagaagttaaaccgggcgtgcgaagagcaacggaggggacgttgatcgacaccgcaacgttgctggcggagctggcgcgtcccgatttgctctctggggacacaacgcatgggcaactggcgcaggcgtttaatcagctacaacatcgcccgtttcgcgccaatatcggtggcattaacaaagtgcgcaatgaatatcatgtctatatgaccgatgcgcagggcaaagtattgttcgattcggcaaataaagccgttggacaggattattcgcgctggaatgacgtctggctaacgttgcgtggtcagtatggtgcgcgcagcacgttgcaaaatcctgccgatcccgaaagttcggtgatgtatgttgccgcaccgattatggacggctcgcggcttattggcgttttgagcgtaggcaaaccgaacgcagcgatggctccggtcattaagcgtagcgagcggcgaattttatgggccagcgccattttgttggggattgcactggtgattggcgcaggcatggtttggtggatcaaccgctctattgccaggctcactcgctatgctgattccgtcactgacaataagcccgttcctctccccgatctcggtagtagcgagttgcgtaaactcgcgcaggcgctggaaagtatgcgcgtgaagctggaagggaaaaactatattgagcagtatgtttatgcgttaactcatgagctaaaaagcccactggcggcgattcgtggcgcggcggaaattttacgcgaaggtccgccgccggaagtggtggctcgttttaccgacaacattctgacgcaaaatgcgcgaatgcaggcactggtggaaacgttactacgccaggcaagactggagaatcgtcaggaagtcgttctgactgctgttgatgtggcggcattatttcgccgcgtcagcgaagcgcgcaccgtgcagttggcagaaaaaaacatcactttgcatgttatgcctactgaggttaacgttgcttctgaaccggcgttactggagcaggcgctggggaatttactggataacgccatcgattttactcccgagagcggttgcataacgctaagcgccgaagtggatcaggaatacgtcacccttaaggtgctggataccggtagtgggattcctgactacgcgctgtcacgtatttttgaacgcttttactctttgccgcgtgcaaatgggcaaaaaagcagcggtctggggttggcgtttgtcagtgaggtcgcccgtttgtttaacggcgaagtcacgctgcgcaacgtgcaggaaggtggcgtgctggcctcgcttcgacttcaccgtcacttcacatagcttcaaattcttcccacatagccttcgtatcctgctgccattgcaaaggagaagactatgttgaaatcccccctgttctggaaaatgaccaccttgtttggtgcagtattgctgttgttgattccgataatgctgattcggcaggtgattgtcgaacgtgccgattaccgtagcgatgtggaagatgtgattcgccaaagtaccagcgggccgcaaaaactcgttgggccgctcatcgctattcctgtgaccgagctttatacggtgcaggaagacgataaaaccgtggagcggaaaagaagttttattcatttttggttacctgagtcattgatggttgatggcaatcagaacgtggaagaacgcaagataggcatctataccggtcaggtctggcacagtgatttaacgctaaaagccgatttcgatgtttcgcgtcttagcgaactcgacgcgccaaatatcaccttaggcaagccatttattgtgattagcgtcggggatgcgcgtggtattggtgtggtgaaagcgcctgaagttaacggtacggcgctgaccattgaacccggcaccgggttagagcaaggcgggcagggcgtgcatatccctttacccgaaggggactggcgcaagcagaacctgaagctgaatgtggcgctgaatttaagcggtaccggcgatctttctgtggtgcctggcgggcgttatagcgaaatgaccttaaccagcaactggccgcatcccagttttttaggtgattttctaccagccaaacgggaagttagcgagtcaggttttcaggcgcaatggcaaagtagctggtttgctaataatctcggtgagcgttttgcttcaggcaatgataccggctgggaaaacttccccgcgtttagcgtcgcagtgacgacgccagccgatcaataccaattaacggaccgggcgactaagtacgccattctgctgattgcgctgacttttatggcattctttgtttttgaaacgctcaccgcgcaacgtttacacccaatgcaatatttgctggtggggctgtcattggtgatgttttatttgctcttgctggcgctttctgaacataccggttttactgtggcatggataatcgccagtctgattggggcgttaatgaacggtatttatttgcaggcggtattgaaaggctggcgtaatagcatgttgtttaccctcgcgctgttgttgctggatggtgtgatgtggggactgctcaactctgccgatagcgcgctgttgttgggaaccagtgtactggtggtggcgctggccggcatgatgtttgtgacccgtaatatcgactggtatgcgttttcactgccgaaaatgaaagccagtaaagaagttacaacggacgatgaattacgtatctggaaataagatagaaaaataaaaacggcgctaaaaagcgccgtttttattgacggtggtaaagccgattaatcttccagatcaccgcagaagcgataaccttcaccgtgaatggtggcgatgatttccggcgtatccggcgtagattcgaaatgtttacgaatacggcggatcgtcacgtctacagtacggtcgtgcggtttcagctcacggccagtcattttcttcagcagttcagcacgggactgaattttgcctgggttttcacagaagtgaagcatggcgcggaactcgctgcgcggcagcttgtactgctcgccatcagggccaatcaacgaacggctgttgatgtccagttcccaaccattgaacttgtagctttcaacgctacgacgttcttcgctgacagtacccagattcatggtacgggacagcaggttgcgtgcacgaatagtcagttcacgcgggttgaacggtttggtgatgtagtcatctgcaccgatttcgaggccgagaattttatcgacttcgttgtcacggccagtcaggaacatcaacgcaacattcgcctgctcgcgcagttcacgcgctaacagaagaccgtttttacccggcagattgatatccatgatcaccaggttgatgtcatattcagagaggatctgatgcatttccgcgccatctgtcgcttcgaaaacatcatagccttccgcttcgaaaatacttttcaacgtgttgcgtgttaccaactcgtcttcaacgataagaatgtgcggggtctgcatgtttgctacctaaattgccaactaaatcgaaacaggaagtacaaaagtccctgacctgcctgatgcatgctgcaaattaacatgatcggcgtaacatgactaaagtacgtaattgcgttcttgatgcactttccatcaacgtcaacaacatcattagcttggtcgtgggtactttccctcaggacccgacagtgtcaaaaacggctgtcatcctaaccattttaacagcaatataacaggctaagaggggcaggacacccaataaaactacgcttcgttgacatatatcaagttcaattgtagcacgttaacagtttgatgaaatgatcgtatctaaatgctagctttcgtcacattattttaataatccaactagttgcatcatacaactaataaacctggtgaatccaattatcgagatttattttttataaaattatcctaagtaaacagaaggatatgtagcattttttaacaattcaatcgttagtacagtcaggaaatagtttagccttttttaagctaagcaaagggcttttcctgcgacttacgttaagaatttgtaaattcgcaacgcgtaataagttgacaatgatcaccctgttcgcggttatttggtcaagaagagtggcaatatgcgtataacgattattctggttgcacccgccagagcagaaaatattggggcagcggcgcgggcaatgaaaacgatgggttttagcgaactgcggattgttgatagtcaggcacacctggagccagccgcccgttgggtcgcacatggatctggtgatattattgataatattaaagttttcaagacactagctgaatcgttacacgatgtcgatttcactgttgccaccactgcgcgcagtcgggcgaaatatcattactacgctacgccagtagaactggtgccgctgttagaggaaaaatcttcatggatgagccatgccgctctggtgtttggtcgcgaagattccgggctgactaacgaagagttagcgttggctgacgttcttactggtgtgccgatggtggcggattatccttcgctcaatctggggcaggcagtgatggtctattgctatcaattagcaacattaatacaacaaccggcgaaaagtgacacaacggcagaccaacatcaactgcaagctttacgcgaacgagccatgacattgctgacgactctggcagtggcagatgacataaaactggtcgactggttacaacaacgcctggggcttttagagcaacgagacacggcaatgttgcaccgtttgctgcatgatattgaaaaaaatatcaccaaataaaaaacgccttagtaagtgattttcgttaatgaggcgaaccgggggaactgaaacatctaagtaccccgaggaaaagaaatcaaccgagattcccccagtagcggcgagcgaacggggaggagcccagagcctgaatcagtgtgtgtgttagtggaagcgtctggaaaggcgtgcgatacagggtgacagccccgtacacaaaaatgcacatgctgtgagctcgatgagtagggcgggacacgtggtatcctgtctgaatatggggggaccatcctccaaggctaaatactcctgactgaccgatagtgaaccagtaccgtgagggaaaggcgaaaagaaccccggcgaggggagtgaaaaagaacctgaaaccgtgtacgtacaagcagtgggagggttaaccgaataggggagccgaagggaaaccgagtcttaactgggcgttaagttgcagggtatagacccgaaacccggtgatctagccatgggcaggttgaaggttgggtaacactaactggaggaccgaaccgactaatgttgaaaaattagcggatgacttgtggctgggggtgaaaggccaatcaaaccgggagatagctggttctccccgaaagctatttaggtagcgcctcgtgaactcatctccgggggtagagcactgtttcggcaagggggtcatcccgacttaccaacccgatgcaaactgcgaataccggagaatgttatcacgggagacacacggcgggtgctaacgtccgtcgngaagagggaaacaacccagaccgccagctaaggtcccaaagtcatggttaagtgggaaacgatgtgggaaggcccagacagccaggatgttggcttagaagcagccatcatttaaagaaagcgtaatagctcactggtcgagtcggcctgcgcggaagatgtaacggggctaaaccatgcaccgaagctgcggcagcgacgcttatgcgttgttgggtaggggagcgttctgtaagcctgtgaaggtggcctgtgagggttgctggaggtatcagaagtgcgaatgctgacataagtaacgataaagcgggtgaaaagcccgctcgccggaagaccaagggttcctgtccaacgttaatcggggcagggtgagtcgacccctaaggcgaggccgaaaggcgtagtcgatgggaaacaggttaatattcctgtacttggtgttactgcgaaggggggacggagaaggctatgttggccgggcgacggttgtcccggtttaagcgtgtaggctggttttccaggcaaatccgtaggtgaagcgacttgctcgtggagctgaaatcagtcgaagataccagctggctgcaactgtttattaaaaacacagcactgtgcaaacacgaaagtggacgtataccttgatcgaagccccggtaaacggcggccgtaactataacggtcctaaggtagcgaaattccttgtcgggtaagttccgacctgcacgaatggcgtaatgatggccaggctgtctccacccgagactcagtgaaattgaactcgctgtgaagatgcagtgtacccgcggcaagacttacacgatatcaatatcgcactgcggcatgccgcccaggtcatcatgctgaaagaggggaaacttatcgacagcggcgacccgcaaacggtgatccatgcagagagccttgcgcaggtatacggcgtacgcgggagagttgaacgttgtgctcagggaagatcgatggtgatagtggatggtgcaatcgaaaaatagtcggattaacgtggttgcttcagcctcaggtaaagatcaattgctcagggaagatcgatggtgatagtggatggtgcaatcgaaaaatagtcggattaacgtggttgcttcagcctcaggtaaagatcaataggaagtctgtaatgcaacatatagaccgccttaatgtcattaaagcacttgtgctttgttccatggtgcataattcacacagatcatcatccaggggcggcgtggcccgtttgtcaggccataaatcagccggtgcagctcggggtacgatggcaatctcggtttttcaccattgaatgacacccacccgggcgtcagatttggaagtagtgatattcggatgacacacgccccaggatacggcgtgccgggtgaagccggtcagccatttctggtagctttcgtggagcagtcgtaacgggtctgatactgtgtttcattttcatattcctcacgggggataacaggcagcagagtgccgccggcaggccggagattgcgtctgctgtgggcgaagggccagtggttaaaaattacggacgggactgtgcaatacgcgcctgcagccaggcttccacttcacttttcagccagcgggagctgcggccgagtttgatgggtgccggaaaggccccatccttgatgagcttgtaaaaccacttatcggtcaggccggtcagctgagtgataaacgtcatatcgaccatctggtcatccatcagcgaaactggggtggtcataaaaatctcctccggatgttgttaatctcagccggcgttgatgatgaaaacaacgcaccaccttcacgtgaacacgtaattcattacgaagtttaattctttgagcatcaaacttttaaattgaagagtttgatcatggctcagattgaacgctggcggcaggcctaacacatgcaagtcgaacggtaacaggaatcagcttgctgatttgctgacgagtggcggacgggtgagtaatgtctgggaaactgcctgatggagggggataactactggaaacggtagctaataccgcataacgtcgcaagaccaaagagggggaccttcgggcctcttgccatcggatgtgcccagatgggattagctagtaggtggggtaaaggctcacctaggcgacgatccctagctggtctgagaggatgaccagccacactggaactgagacacggtccagactcctacgggaggcagcagtggggaatattgcacaatgggcgcaagcctgatgcagccatgccgcgtgtatgaagaaggccttcgggttgtaaagtactttcagcggggaggaagggagtaaagttaatacctttgctcattgacgttacccgcagaagaagcaccggctaactccgtgccagcagccgcggtaatacggagggtgcaagcgttaatcggaattactgggcgtaaagcgcacgcaggcggtttgttaagtcagatgtgaaatccccgggctcaacctgggaactgcatctgatactggcaagcttgagtctcgtagaggggggtagaattccaggtgtagcggtgaaatgcgtagagatctggaggaataccggtggcgaaggcggccccctggacgaagactgacgctcaggtgcgaaagcgtggggagcaaacaggattagataccctggtagtccacgccgtaaacgatgtcgacttggaggttgtgcccttgaggcgtggcttccggagctaacgcgttaagtcgaccgcctggggagtacggccgcaaggttaaaactcaaatgaattgacgggggcccgcacaagcggtggagcatgtggtttaattcgatgcaacgcgaagaaccttacctggtcttgacatccacagagtgagacaggtgctgcatggctgtcgtcagctcgtgttgtgaaatgttgggttaagtcccgcaacgagcgcaacccttatcctttgttgccagcggtccggccgggaactcaaaggagactgccagtgataaactggaggaaggtggggatgacgtcaagtcatcatggcccttacgaccagggctacacacgtgctacaatggcgcatacaaagagaagcgatctcgcgagagcaagcggacctcataaagtgcgtcgtagtccggattggagtctgcaactcgactccatgaagtcggaatcgctagtaatcgtggatcagaatgccacggtgaatacgttcccgggccttgtacacaccgcccgtcacaccatgggagtgggttgcaaaagaagtaggtagcttaaccttcgggagggcgcttaccactttgtgattcatgactggggtgaagtcgtaacaaggtaaccgtaggggaacctgcggttggatcacctccttaccttaaagaagcgtactttgcagtgctcacacagattgtctgatagaaagtgaaaagcaaggcgtcttgcgaagcagactgacacgtccccttcgtctagaggcccaggacacctgccctttcacggcggtaacaggggttcgaatcccctaggggacgccacttgctggtttgtgagtgaaatcagctgggagagcgcctgctttgcacgcaggaggtctgcggttcgatcccgcatagctccaccatctctgtagtgattaaataaaaaatacttcagagtgtacctgcaaaggttcactgcgaagttttgctctttaaaaatctggatcaagctgaaaattgaaacactgaacaacgagagttgttcgtgagtctctcaaattttcgcaacacgatgatgaatcgcaagaaacatcttcgggttgtgaggttaagcgactaagcgtacacggtggatgccctggcagtcagaggcgatgaaggacgtgctaatctgcgataagcgtcggtgaggtgatatgaaccgttataaccggcgatttccgaatggggaaacccagtgtgtttcgacacactatcattaactgaatccatagctagaagatgagcagattgttcgttttaacatcgctgcgaacgataacgcctcgcagatccacatgctcgttgacggtctgggcgtcgggctgacacatgagcctgtcgctgccggaatgatttcgcaccggacagcttgtcaccgttctaggcaacatgacagacctgcgcattcctatttctattatctatccgcctaccaagttgcttaatgtcaggctaaggccctttaatgactggatttcagaccgattttctggacagccgagcgggtaaatcgcagtacactgacagctagacaataaagctccggttcatgtttgaaccatgtgtagtgaatgtccgctgttcgctcacaacggaccttcagttcagccgctccggccgcttcatgccatgaatgtacgcagccagtcagaatattaaggtgcggatttcagttcacttgccagcccagtgacacaagacagtaatgaccaacaatttggtattgacacaacaagttgcggccccggttcgtgggggagatgaaacgaaggtagctgaagttactgaaatgaagaattcagagagactgaatgatatgtcgcaccttcagtgaatagtgtaaaacgggatactctcacccgggattatccactcatgctcaatgtataattttcgtgcccctcacaggtaagagccggatacattcgttgtgtatgctgcagaattggtaaccggggccctgcagtctttaactccgagtcttgtgctgctcatttgccacaaaatcctggtacgccagctcaatcatttcattcaacagtttttttggggggcaccacgacttcgggcaatactttcaagctgtttgtggatttttccggacagtttcagcgggacggaaccatcagcacgttcatcacgccttttttgttgctcccgggcacttttcagttcatccacaatatagctgctcttctcgcatttttgccgattttaaaaatgcgaacaaaacatccgtacatgatgtacagattaaactgccagggactggtgtcagaaagcctccggttagcctgctctttccggaatgtgccggttatgaaaaaccggaaattcagtctctgttgtaagatgtaccctctgatactacgttttcgttttctctgtgtatttaactcactgtatttattgtctttttaagcctgactgatattctccggtcatagtgtgctggatagacatcccgtaaccttctcatttttatataaaaatacctgcactgtcttcagcgcatctgtctcctttaagtaaaaaatgttttcacgtattgctgtaaattcattttaaatcagtatgttatcctgatattgctgtctcctggtttgatgcgtaatcgttctgcctttctggatgattctggtgcttccgggtgcattctcctctgcacatgcaacagttcgtcatcgccacgtgcccaaaaagcatataaaaacgaatcgaatctgatcgttttttcaatcgtttttcacaggaatttcgtagggtgttctccgctatagcctccatatttgctgtctttttcttcataaatcgtatgcaatataaccagtctgtcaagacatcttccctgctgttgaggtgacgatctcatttctggtcttttccgggagagagacggtcagatgagcgagccggatttactgccagaggtactccccgcggcagaaaatagtgctcctgtttccgcaatccgggatcggcaacgtcccatggttaatgccacttgcagcgtcaggcactgcaggtttacgtcgtgatctgatttcttctgcacttatcccgatcacggaagttccccctgcgcagacatcggttcctgccgacatttcacaataccgccaggctgtcatgcagtaacacccgcaatgcggtctgcggttttaagcgcactctcctgttttcagtgcaccgataagcgttatagaaagtctggggtgagttactgaatgtctgttaagtggtgccgtgggtggagactgcttacttttccacagcaactgcagtcattcaggatgctcaggagagaatatgtcaacgccacgagccgggccattttcatgccagccagtatattttctacactgatgcagtctgattttcaccattccatcctcactgattgtcgtgttgttttgggtcatcaccacagctttccgtttctcttttaatcggtaacgctctcctttgatattcagcgtggttgagtgatgcagcagtcaatccaggagcgctgttgtccggcaaccaccatatcaacttcttcccggcgtgccggcgctggtatccaggccgggtttcgaagcgaagcgttcctgacggactcattgacatccgggccggatgtagtcatgcagcatggaacgtccgcccgtatacactgacggcgtccggccgtgtacagagatcggtaaaattcgttactacaactgttcctgaatatctgacgaagaaacattcagccataacatccggccgtgtacatctcttttgcggtgcagggagtgctgtcgccatgtacttattgtcaccagggtgaggcatgtaccgcagcatgccagctcagcaatgacaggatgcccttaagacatccgtcatggctcagtatgatgacgacgaacacgctctgcaggtgagcatgcrgggccgggrgyatcatcatttccgtattttgycrcaccttccggaarcaaccggcatcagttrcggttaycgtcaaccgttgtgcggtatgccaggagcacgtactgatccatcagatccgtcagtgctgcgytctgcytctgacggtygatgatccattccyccagctctttttctgatttccgtttcaggttctccgtccagtcktcaaggctgtttccggtcattaaatcaagccagcaaagccagaccagtttgaggcgcaactccgtgccaccaaactgacggaagaggctratcagtttatttgccagagaacgctgcctcagacgttcacattcagacagsagaatsccttccagcatcggatgatgaaccaggtcttcagaggtatcccattatgaaaatcatcacccgtggtgaagccatgcgtattcaccaacagcatcctgcatcccgtctttttccgttctgtaccggcaaataccgctggcacggcagcactgaagcgtataccggtcgtgaagtgcaggatattcccggtgtgttggccgtgtttgctgaacgtcgtaaggacagttttggcccgtatgtccggctgatgagcgtcaccctgaactgaatcaggacgggcattcagatgagcagcattatcaccatcacagtgtatacgctggatgaactttcctgcccggcacggggaaaagcccgcgactggtaccgtcagcatcatgctgacagcaactggtatgaaaacgtgtatgaagacttcagggaggtctgtggcattttcgggattgacctccgccagcgcgttttccggctcagcaatggcaggtttatggaagagccgtgcatctggttcagcggattctgcagccagggggacggagcctgttttgaagggcgctggcactggcagccagcgacaccccggaaaatcagggaatatgcccctcaggaccgtgagcttcatcgtatcgcggataccctgcaggcggtgcagaaacgtaacttctggcagcttcaggctgaaatcagtcaccggggacgttactgccatccgtacagcatggatatcaccgtcacccggaacagtccgactggtcaggcaatgacaaccgatgcggaagccgctgtcagcgaagccctgcgcgacctggccttctggttgtaccgtcaactggaaaacgagtacgactggctgacctcagacgccgctgtggatgaggccctgctcatcaacgaatacaccttcaccgaagccggtctgtgcaccggctgacccgtcatcgttaaactatcattcaccgattttctgtgaggactttatcgtgtcagacacgctccatgaaacaaattatcccgacgacaacaacgaccgcccctggtgggggctaccctgcaccgtgacgccctgtttcggggcacgtctggtgcaggagggcaatcagttgcattaccttgccgaccgcgccggtatcagagggcagttcagcgacgcggatgcataccatctggaccaggtattttatcaggacatttaataagattaatttttatgatagtgataatttatgatggggattcatatggcatatctaaaaggatagattacatgttgaattctacaacatcttcgggaaaaagaaccggcattttagcaattggtgcccatcctgatgatatagaattaggatgtggtgcatctctttcatattattctaatgaaaaagtatatattatatctgttgtcatgacacctggttgctgtggcgcagagtatattgatcgtcacaaggaatcacaagaagcattaaatatgttaggatgcaataaactaatccctctaaattttgaagataccagattatatttgcaaataaaagagatgatatcatctctggaatacataattgagaatgaaacgccccaggatgtggaaattactcgagtttacaccatgaataatactgacaggcatcaggatcacattgctgtttatcaggcatcaatggttgcctgtcgttatattcctcaaatactaggatacgaaacaccaagtacatgtctgtcatttttacctcaagtttttgaatctgtagatgaggtccattttaataaaaaaatattagcattacaaaagcataaaagccagatccatcgaagatacatacagccagaatacataattgctcaagccaaattccgaggacaacaggttagtcattctatgtgtgaaggttttgttgtccataagatggtgttgtaacggagtaatagaaatgaaaactttgttatttatcttcatgaccatagcaatgttgctatggtttttaagtacgctaagacgtaaaccctgtcaaaagaaaggctgtattgacgccattataccagcttataacgaaggcccgtgtctggcgcagtcactggataatctgctgcgtaacccttatttttgccgggtaatttgcgttaacgacggatccacggacaataccgaagcggtcatggcggaagtcaaacgcaaatggggcgaccgctttgttgccgtcacgcaaaaaaacaccggtaaaggtggcgcactaatgcatggactaaaatacgccacgtgtgatcaagtatttttaagtgatgcagatactttcgttccacctgataatgatggaatgggctatatgctggcagaaattgagcgcggcgctgatgccgttggcggaattccctccaccgcgttaaaaggggcaggtctgctgccacatatccgcgccaccgtaaagttgccgatgattgttatgaagcgcacgctacagcagtttctgggcggtgcaccgtttattatcagcggtgcctgcgggatgttccgtactgatgtattgcgtaagttcggtttctctgatcgtactaaagtcgaagaccttgatctcacctggacgttggtggcaaacggctaccgtattcggcaggcgaatcgctgcatcgtatacccacaggaatgtaacagtccgcgtgaggagtggcgccgctggcggcgttggattgtgggctacgcggtctgtatgcgcctgcataaaagacttttatttagccgcttcggtatcttcagtatatttcctatgctgttggttgtgctttatggcgttggtatttatctcactacctggtttaatgaattcatcaccaccgggccacatggtgtggtgttggcaatgttcccgcttatctgggtcggcgtagtttgtgttattggtgcatttagcgcctggtttcatcgttgctggttgttggtgcctttagcaccgctttccgttgtgtatgtattattagcttatgccatctggattatttatggacttattgccttttttactggacgcgaacctcagcgcgacaaacccacccgctattccgcactggtggaagcgtcaaccgcttattcccaaccttctgtcacaggaactgaaaaactatctgaagcttaatgctaaagagaaaaatgttcagattgcagaccaggtgattattgatgaaagtgccggtgaggttgttatcggcgcgaatacccgtatttgccacggtgccgttattcaggggccggtagtgattggcgcaaactgcctgataggtaattatgcgtttattcgtcctggcacaataatcagcaatggcgtaaaaattggttttgccaccgaaattaaaaatgcggttattgaagcggaagcaacgattggtccgcaatgctttattgccgactcggtagttgcaaaccaggcatatttgggcgcacaagtacgtaccagtaatcatcgtctggatgaacaacccgtgtctgttcgaactccagagggaattatcgctaccggatgcgataaattaggttgttatatcgggaagcgttcacgccttggtgtacaagttattattttgcctgggcgaattatttctccgaacacacaacttggcccgcgcgtgattgtagaacgtaatttacctagtggaacttactcactccgacaagaacttatccgtacaggagattaaaatgataaagcatacgttattagtgccgtttttttttagtgcattgcccgcttatgccgggttaacttccattaccgcgggctacgattttaccgattattctggcgaacatggcaaccgtaatttagcgtatgctgaactggtagcaaaagttgaaaacgcaacgctgctttttaatctttcccaggggcgtcgtgattatgaaactgaacatttcaatgccactcgcggccagggtgcagtctggtacaaatggaataactggctgacaacccgaacgggtattgcctttgcggataatacgccggtctttgcccgccaggattttcgacaggatattaacctagccctgttgccaaaaacgcttttcacgaccggttatcgctacactaaatattacgatgatgtcgaagtcaatgcctggcaaggcggcgtatcactctatactggcccggtgatcaccagttaccgctatacccattatgactccagcgatgcaggtagtagttatagcaatatgatttccgtgcgtctgaaggacccgcgcggtgctggttatacgcaactatggctaagccgcggaacaggtgcttacacctacgactggacgccagaaacacgctacggcagcatgaagagcatcagtttgcaacgaattcaaccgctgactgagcaacttaatctcgggttgacggcaggtaaagtgtggttcaacaccccaaccgatgattataacggtctgcaacttgcagcccacctgatctggaaattctaggcagcagtctatcagtatattttattcggtagttttcagagaaaaagaaatatacggccggcaaggtgtggagctgagccgttcactgctgtcgggctgggtggatgcatgctgccggcagctgtctccgctggaagaggcgcttcatgctgatgacacgcctgtcccggtgctgttgccaggcaataagaaaacgaagaccgggcggttatggacctacgttcgtgacgaccgtaacgccgggtcaacgctggcgccggcggtgtggttcgcttacagcccggacagaaaaggcatccatccgtaaaatccacgatgtgcacgttcgcaccccgtcagccctgacggaggaagcgctgaaacggatcggcgaactgtacgccatcgaggcagagataaggtataacgtttatcgacctcacacgaacaacgatggtttaccgccttgcttacatgaagaaaagtggaaacaggttattccggtgtcctgattttgtgaaccactacaggttgctttttttaatatatctcgctcaaggcgagcttcatttaacgccttacgcagttgcagaatttcagattccagttcagccaccgtgcgggaaccaggagtaccgagcccttttctggcggcggtaacccattgtcctaaagtgccttcaggaagagataatcgggaagcgccttcactgatcgaaagttgattttcaagaaccgttctgacagcttcggctttgaactctttagagtaacgttgggtttttctgctcattattagctctgtaagcgtacagcctgaaccgtctggtcagaatctgacgaattagacaaagtggtgtccaccaaataagtagtgggaaccaaagtgtcagatatgcagaaaaatgtgactcccggcaggcgaaaaggctgccctaattatcctcccgaatttaaacagctgctcgtaacacatctgcaagaatcattattctcttgcctgaagctatccagcatcctcagatatttcgcgctttatgagctggcatcagcaaaatgtgccagtaactttttattaatgacttcaaacagttcctgttcatcatgggtcagataatcccagatttctttcagatacatgctttgtgcaagagtgagcctctgaataaaaaacataccttcagatgtcagactgatttttttagcacggcgatcctccctgctatccgtcctttttacatatccggctttttctaaaaaatctgtaatgcgggtaatattagttctggtaaactgaagtttctggcttatctctgaaggtgacagacaatggttctccgctgcgaataatgtggtgagaaccatatatgctgagtgatttattccatacacccccagaaattcagatatattatcctgcattcttttatttgtgcgaatacagagctgcatcaacaaatgttcccgaaagggatatgcggggtctttgtttttttggtgtctgattattttttctaatgtgtctgtgttattcatttcattattctccatattactgaaacacactgtctgtgtacaagcgcgcatcagtcatccggtaaacatcgactttccactacaatttattcctacctgatttctgtatgacagagacagcagacggataaattcccgcaggtaaaagaacataaatgctggctgctgacaagtctgtgaaaaaggattatcccggttcaaagctctgctgaacgatagcgatcttttcctgtgtagtacgccgtctgcgtttctccggccctaagacatcaatcatctgttctccaatgactagtctaaaaactagtattaagactatcacttatttaagtgatattggttgtctggagattcagggggccagtctagaagccagttcaagaccgggcagtgcattggcatgacaacccgaacaccagtgatgcgtccactccggtcctctcgtactaggagcagcccccctcagttctccagcgcccacggaccgaactgtctcacgacgttctaaacccagctcgcgtaccactttaaatggcgaacagccatacccttgggacctacttcagccccaggatgtgatgattcgtgcaggtcggaacttacccgacaaggaatttcgctaccttaggaccgttatagttacggccgccgtttaccggggcttcgatcaagagcttcgcgttaccgctaaccccatcaattaaccttccggcaccgggcaggcgtcacaccgtatacgtccactttcgtgtttgcacagtgctgtgtttttaataaacagttgcagccagctggtatcttcgactgatttcagctccacgagcaagtcgcttcacctacatatcagcgtgccttctcccgaagttacggcaccattttgcctagttccttcacccgagttctctcaagcgccttggtattctctacctgaccacctgtgtcggtttggggtacgatttgatgttaccttctccgtccccccttcgcagtaacaccaagtacaggaatattaacctgtttcccatcgactacgcctttcggcctcgccttaggggtcgactcaccctgccccgattaacgttggacaggaacccttggtcttccggcgagcgggcttttcactggttcactatcggtcagtcaggagtatttagccttggaggatggtccccccatattcagacaggataccacgtgtcccgccctactcatcgagctcacaatatgtgcatttttgtgtacggggctgtcaccctgtatcgcgcgcctttccagacgcttccactaacacacacactgattcaggctctgggctgctccccgttcgctcgccgctactgggggaatctcggttgatttcttttcctcggggtacttagatgtttcagttcccccggttcgcctcattaacctatggattcagttaatgatagtgtgtcgaaacacactgggtttccccattcggaaatcgccggttataacggttcatatcacctcaccgacgcttatcgcagattagcacgtccttcatcgcctctgactgccagggcatccaccgtgtacgcttagtcgcttaacctcacaacccgaagatgtttcgttgcgaaaatttgagagactcacgaacaactctcgttgttcagtgtttcaattttcagcttgatccagatttttaaagagcaaaacttcgcagtgaacctttgcaggtacactctgaagtattttttatttaatcactacagagatggtggagctatgcgggcttgatccagatttttaaagagcaaatatctcaaacatcacccgaagatgagttttgagatattaaggcaggtgactttcactcacaaaccagcaagtggcgtcccctaggggattcgaacccctgttaccgccgtgaaagggcggtgtcctgggcctctagacgaaggggacgtgtcagtctgcttcgcaagacgccttgcttttcactttctatcagacaatctgtgtgagcactgcaaagtacgcttctttaaggtaaggaggtgatccaaccgcaggttcccctacggttaccttgttacgacttcaccccagtcatgaatcacaaagtggtaagcgccctcccgaaggttaagctacctacttcttttgcaacccactcccatggtgtgacgggcggtgtgtacaaggcccgggaacgtattcaccgtggcattctgatccacgattactagcgattccgacttcatggagtcgagttgcagactccaatccggactacgacgcactttatgaggtccgcttgctctcgcgaggtcgcttctctttgtatgcgccattgtagcacgtgtgtagccctggtcgtaagggccatgatgacttgacgtcatccccaccttcctccagtttatcactggcagtctcctttgagttcccggccggaccgctggcaacaaaggataagggttgcgctcgttgcgggacttaacccaacatttcacaacacgagctgacgacagccatgcagcacctgtctcacggtacaattttgtaatccgggttttcggcgttaaaacgttgggccagagaatccacctctttacccagttccccttccatagaatgccagaacggaatggtcgtcactgcctgcgcatttgccattaaagccagtccgagcgccagtgctgaagctgtataacgtgctgcatggctgtcgtcagctcgtgttgtgaaatgttgggttaagtcccgcaacgagcgcaacccttatcctttgttgccagcggtccggccgggaactcaaaggagactgccagtgataaactggaggaaggtggggatgacgtcaagtcatcatggtccttacgaccagggctacacacgtgctacaatggcgcatacaaagagaagcgacctcgcgagagcaagcggacctcataaagtgcgtcgtagtccggattggagtctgcaacttcgactccatgaagtcggaatcgctagtaatcgtggatcagaatgccacggtgaatacgttcccgggccttgtacacaccgcccgtcacaccatgggagtgggttgcaaaagaagtaggtaggagggtgcttctttgtgatttatagtcgtaacaaggtaaccgtaggggaacctgcggttggatcacctccttaccttaaagaagcgtactttgcagtgctcacacagattgtctgatagaaagtgaaaagcaaggcgtcttgcgaagcagactgayacgtccccttcgtctagaggcccaggacaccgccctttcacggcggtaacaggggttcgaatcccctaggggacgccacttgctggtttgtgagtgaaagtcacctgccttaatatctcaaaactcatcttcgggtgatgtttgagatatttgctctttaaaaatctggatcaagctgaaaattgaaacactgaacaacgagagttgttcgtgagtctctcaaattttcgcaacacgatgatgaatcgcaagaaacatcttcgggttgtgaggttaagcgactaagcgtacacggtggatgccctggcagtcagaggcgatgaaggacgtgctaatctgcgataagcgtcggtgaggtgatatgaaccgttataaccggcgatttccgaatggggaaacccagtgtgtttcgacacactatcattaactgaatccataggttaatgaggcgaaccgggggaactgaaacatctaagtaccccgaggaaaagaaatcaaccgagattcccccagtagcggcgagcgaacggggaggagcccagagcctgaatcagtgtgtgtgttagtggaagcgtctggaaaggcgtgcgatacagggtgacagccccgtacacaaaaatgcacatattgtgagctcgatgagtagggcgggacacgtggtatcctgtctgaatatgggagggaccatcctccaaggctaaatactcctgactgaccgatagtgaaccagtaccgtgagggaaaggcgaaaagaaccccggcgaggggagtgaaaaagaacctgaaaccgtgtacgtacaagcagtgggagccttttgtataatgggtcagcgacttatattctgtagcaaggttaaccgaataggggagccgaagggaaaccgagtcttaactgggcgttaagttgcagggtatagacccgaaacccggtgatctagccatgggcaggttgaaggttgggtaacactaactggaggaccgaaccgactaatgttgaaaaattagcggatgacttgtggctgggggtgaaaggccaatcaaaccgggagatagctggttctccccgaaagctatttaggtagcgcctcgtgaattcatctccgggggtagagcactgtttcggcaagggggtcatccgtcatcatggcccttacgaccagggctacacacgtgctacaatggcgcatacaaagagaagcgacctcgcgagagcaagcggacctcataaagtgcgtcgtagtccggattggagtctgcaactcgactccatgaagtcggaatcgctagtaatcgtggatcagaatgccacggtgaatacgttcccgggccttgtacacaccgcccgtcacaccatgggagtgggttgcaaaagaagtaggtagcttaaccttcgggagggcgcttaccactttgtgattcatgactggggtgaagtcgtaacaaggtaaccgtaggggaacctgcggttggatcacctccttaccttaaagaagcgtactttgcagtgctcacacagattgtctgatgaaaatgagcagtaaaacctctacaggcttgtagctcaggtggttagagcgcacccctgataagggtgaggtcggtggttcaagtccactcaggcctaccaaatttgcaccgcaaatttgaagaggttttaactacatgttatggggctatagctcagctgggagagcgcctgctttgcacgcaggaggtctgcggttcgatcccgcatagctccaccatctctgtagtgattaaataaaaaatacttcagagtgtacctgcaaaggttcactgcgaagttttgctctttaaaaatctggatcaagctgaaaattgaaacactgaacaacgagagttgttcgtgagtctctcaaattttcgcaactctgaagtgaaacatcttcgggttgtgaggttaagcgactaagcgtacacggtggatgccctggcagtcagaggcgatgaaggacgtgctaatctgcgataagcgtcggtgaggtgatatgaaccgttataaccggcgatttccgaatggggaaacccagtgtgtttcgacacactatcattaactgaatccataggttaatgaggcgaaccgggggaactgaaacatctaagtaccccgaggaaaagaaatcaaccgagattcccccagtagcggcgagcgaacggggaggagcccagagcctgaatcagtgtgtgtgttagtggaagcgtctggaaaggcgtgcgatacagggtgacagccccgtacacaaaaatgcacatattgtgagctcgatgagtagggcagggacaccgtggtatcctgtctgaatatggggggaccatcctccaaggctaaatactcctgactgaccgatagtgaaccagtaccgtgagggaaaggcgaaaagaaccccggcgaggggagtgaaaaagaacctgaaaccgtgtacgtacaagcagtgggagcctcttaatggggtgactgcgtaccttttgtataatgggtcagcgacttatattctgtagcaaggttaaccgaataggggagccgaagggaaaccgagtcttaactgggcgttaagttgcagggtatagacccgaaacccggtgatctagccatgggcaggttgaaggttgggtaacactaactggaggaccgaaccgactaatgttgaaaaattagcggatgacttgtggctgggggtgaaaggccaatcaaaccgggagatagctggttctccccgaaagctatttaggtagcgcctcgtgaattcatctccgggggtagagcactgtttcggcaagggggtcatcccgacttaccaacccgatgcaaactgcgaataccggagaatgttatcacgggagacacacggcgggtgtccccttcgtctagaggcccaggacaccgccctttcacggcggtaacaggggttcgaatcccctaggggacgccacttgctggtttgtgagtgaaagtccgaccttaatatctcaaaactcatcttcgggtgatgtttgagatatttgctctttaaaaatctggatcaagctgaaaattgaaacactgaacaacgagagttgttcgtgagtctctcaaattttcgcaacacgatgatgaatcgcaagaaacatcttcgggttgtgaggttaagcgactaagcgtacacggtggatgccctggcagtcagaggcgatgaaggacgtgctaatctgcgataagcgtcggtgaggtgatatgaaccgttataaccggcgatttccgaatggggaaacccagtgtgtttcgacacactatcattaactgaatccataggttaatgaggcgaaccgggggaactgaaacatctaagtaccccgaggaaaagaaatcaaccgagattcccccagtagcggcgagcgaacggggaggagcccagagcctgaatcagtgtgtgtgttagtggaagcgtctggaaaggcgtgcgatacagggtgacagccccgtacacaaaaatgcacatactgtgagctcgatgagtagggcgggacacgtggtatcctgtctgaatatggggggaccatcctccaaggctaaatactcctgactgaccgatagtgaaccagtaccgtgagggaaaggcgaaaagaaccccggcgaggggagtgaaaaagaacctgaaacgacgtcaagtcatcatggcccttacgaccagggctacacacgtgctacaatggcgcatacaaagagaagcgacctcgcgagagcaagcggacctcataaagtgcgtcgtagtccggattggagtctgcaactcgactccatgaagtcggaatcgctagtaatcgtggatcagaatgccacggtgaatacgttcccgggccttgtacacaccgcccgtcacaccatgggagtgggttgcaaaagaagtaggtagcttaaccttcgggagggcgcttaccactttgtgattcatgactggggtgaagtcgtaacaaggtaaccgtaggggaacctgcggttggatcacctccttaccttaaagaagcgtactttgcagtgctcacacagattgtctgatagaaagtgaaaagcaaggcgtcttgcgaagcagactgayacgtccccttcgtctagaggcccaggacaccgccctttcacggcggtaacaggggttcgaatcccctaggggacgccacttgctggtttgtgagtgaaagtcacctgccttaataatctcaaaactcatcttcgggtgatgtttgagatatttgctctttaaaaatctggatcaagctgaaaattgaaacactgaacaacgagagttgttcgtgagtctctcaaattttcgcaacacgatgatgaatcgcaagaaacatcttcgggttgtgaggttaagcgactaagcgtacacggtggatgccctggcagtcagaggcgatgaaggacgtgctaatctgcgataagcgtcggtgaggtgatatgaaccgttataaccggcgatttccgaatggggaaacccagtgtgtttcgacacactatcattaactgaatccataggttaatgaggcgaaccgggggaactgaaacatctaagtaccccgaggaaaagaaatcaaccgagattcccccagtagcggcgagcgaacggggaggagcccagagcctgaatcagtgtgtgtgttagtggaagcgtctggaaaggcgtgcgatacagggtgacagccccgtacacaaaaatgcacatattgtgagctcgatgagtagggcgggacacgtggtatcctgtctgaatatggggggaccatcctccaaggctaaatactcctgactgaccgatagtgaaccagtaccgtgagggaaaggcgaaaagaaccccggcgaggggagtgaaaaagaacctgaaaccgtgtacgtacaagcagtgggagcctcttaatggggtgactgcgtaccttttgtataatgggtcagcgacttatattctgtagcaaggttaaccgaataggggagccgaagggaaaccgagtcttaactgggcgttaagttgcagggtatagacccgaaacccggtgatctagccatgggcaggttgaaggttgggtaacactaactggaggaccgaaccgactaatgttgaaaaattagcggatgacttgtggctgggggtgaaaggccaatcaaaccgggagatagctggttctccccgaaagctatttaggtagcgcctcgtgaattcatctccgggggtagagcactgtttcggcaagggggtcatcccgacttaccaacccgatgcaaactgcgaataccggagaatgttatcacgggagacacacggcgggtgctaacgtccgtcgtgaagagggaaacaacccagaccgccagctaaggtcccaaagtcatggttaagtgggaaacgatgtgggaaggcccagacagccaggatgttggcttagaagcagccatcatttaaagaaagcgtaatagctcactggtcgagtcggcctgcgcggaagatgtaacggggctaaaccatgcaccgaagctgcggcagcgacacttatgtgttgttgggtaggggagcgttctgtaagcctgcgaaggtgtgctgtgagggttgctggaggtatcagaagtgcgaatgctgacataagtaacgataaagcgggtgaaaagcccgctcgccggaagaccaagggttcctgtccaacgttaatcggggcagggtgagtcgacccctaaggcgaggccgaaaggcgtagtcgatgggaaacaggttaatattcctgtacttggtgttactgcgaaggggggacggagaaggctatgttggccgggcgacggttgtcccggtttaagcgtgtaggctggttttccaggcaaatccggaaaaccaaggctgaggcgtgatgacgaggcactacggtgctgaagcgacaaatgccctgcttccaggaaaagcctctaagcatcaggtaacatcaaatcgtaccccaaaccgacacaggtggtcaggtagagaataccaaggcgcttgagagaactcgggtgaaggaactaggcaaaatggtgccagtaacttcgggagaaggcacagctgatatgtaggtgaagcgacttgctcgtggagctgaaatcagtcgaagataccagctggctgcaactgtttattaaaaacacagcactgtgcaaacacgaaagtggacgtatacggtgtgacgcctgcccggtgccggaaggttaattgatggggttagcggtaacgcgaagctcttgatcgaagccccggtaaacggcggccgtaactataacggtcctaaggtagcgaaattccttgtcgggtaagttccgacctgcacgaatggcgtaatgatggccaggctgtctccacccgagactcagtgaaattgaactcgctgtgaagatgcagtgtacccgcggcaagacggaaagaccccgtgaacctttactatagcttgacactgaacattgagccttgatgtgtaggatagagctgggtttagaacgtcgtgagacagttcggtccctatctgccgtgggcgctggagaactgaggggggctgctcctagtacgagaggaccggagtggacgcatcactggtgttcgggttgtcatgccaatggcactgcccggtagctaaatgcggaagagataagtgctgaaagcatctaagcacgaaacttgccccgagatgagttctccctgactccttgagggtcctgaaggaacgttgaagacgacgacgttgataggccgggtgtgtaagcgcagcgatgcgttgagctaaccggtactaatgaaccgtgaggcttaaccttacaacgccgaagatgttttggcggatgagagaagattttcagcctgatacagattagattaaccggcgacaagcgggttaatgaaacagaatttgcctggcggccttagcgcggtggtcccacctgaccccatgccgaactcagaagtgaaacgccgtagcgccgatggtagtgtggggtctccccatgcgagagtagggaactgccaggcatcaaattagaaaaaccccggtcaataaggccggggttttttgcatatcaattatttgcatgatgaagggaatctcatgtcagttctgtatatccaaattcgtcgtaatcaaattactgttcgcgatcttgaaagcaaacgtgaagtgtcaggagatgctgccttcagtaaccagcgcctgttaatcgccaatttctttgttgcagaaaaagttctgcaagatcttgttctgcaactccacccacgttcaacctggcattcttttttgccagcaaaacgtatggatattgttgtgagcgcgctggaaatgaatgagggcggtttgtcacaggttgaggaacgcattcttcatgaagtggtcgcaggggcaacgttaatgaaatatcgccagttccacatccatgcgcaatcagtggtactcagtgatagtgcggtcctggcaatgtttaagcagaaataatcatgtcaccattggtgggtacgaaacctaaagttcagcccaccgggatgagaaaaaaaccgcctacacccccacatatgccagattcagcaacggatacggtttccccaaatcgtccacctcagagcgttccgtaaccttaaagcccaccttcttatagaacccaaccgcctgctcattttgctcattaacattggttgtcagttccggggccattgagagcgcatgcttcaccagcatccggcccacgccgcagccgcgcacatcaggatcgataaacagcgcatccatatgctgcccacttaacaacataaacccaaccggctgatcccgctcattaaccgcgacccacaacggtgcttccggcagaaaggaatgcaccagctcttccagctcggcccgatactctgctgataaaaaatcgtgagtggcatcgacagaacgacaccaaatcgcaacgagttcctccccctcctcatgccgtgagcggcgaatactaataaccattttctctccttttcgtcattcttatattctaacgtagccttttccttgaaactttctcaccttcaacatgcaggctcgacattggtaaattttctggttatcttcagctatctggatgtctaaacgtataagcgtatatagtgaggtaatcaggttatgccgattcgtgtgccggacgagctacccgccgtcaatttcttgcgtgaagaaaacgtctttgtgatgacaacttctcgcgcgtctggtcaggaaattcgtccgctaaaggtgcttatccttaacctgatgccgaagaagatcgaaactgaaaatcagtttctgcgcctgctttcaaactcacctttgcaggtcgatattcagcttttgcgcatcgattcccgtgaatcgcgcaacacgcccgcagagcatctgaataacttctactgtaactttgaagatattcaggaacaaaactttgacggtctgatagttaccggcgcgccactgggcctggtggagtttaatgatgtcgcttactggccgcagatcaaacaggtgctggagtggtcgaaagatcacgtcacctcgacgctgtttgtctgctgggctgtacaggccgcgctcaatatcctctatggtattcctaagcaaacccgcaccgacaaactctctggcgtttacgagcatcatattctccatcctcatgcgcttctgacgcgtggctttgatgattcattcctggcaccgcattcgcgctatgctgactttccggcagcgttgattcgtgattataccgatctggaaattctggcagagacggaagaaggggatgcatatctgtttgccagcaaagataagcgcattgcctttgtgacgggccatcccgaatatgatgcgcaaacgctggcgcaggaatatttccgcgatgtggaagccgggctagacccggatgtaccgtataactatttcccgcacaatgatccgcaaaatacaccgcgagcgagctggcgtagtcacggtaatttgctgtttaccaactggctcaactattacgtctaccagatcacgccatatgatctacggcacatgaatccaacgctggattaatcttctgtgatagtcgatcgttaagcgattcagcaccttacctcaggcaccttcgggtgccttttttatttccgaaacacacctcagtaagtgaataaattttatttatattgttatcaataagttaacatgtatttttaattaaaatggaaattgtttttgattttgcattttaaatgagtagtcttagttgtgctgaacgaaaagcgcacaacgatccttcgttcacagtggggaagttttcggatccatgacgaggagctgcacgatgactgaacaggcaacaacaatcgatgaactggcttttacaaggccgtatggcgagcaggagaagcaaattcttactgccgaagcggtagaatttctgactgagctggtgacgcattttacgccacaacgcaataaacttctggcagcgcgtattcagcagcagcaggatatcgataacggaatgttgcctgattttatttcggaaacagcttccattcgttatgctgactggaaaattcgcgggattccttcggacttagaagatcgtcgcgtagagattaccggacctgtagagcgcaagatggtgatcaacgcgctcaacgccaatgtgaaagtctttatggccgatttcgaagattcactggcaccagactggaacaaagtgatcgatgggcaaattaacctgcgcgatgcggttaacggcaccatcagctatagcaatgaagcaggcaaaatttatcagctcaagcccaatccagcggttttgatttgtcgggtacgcggtctgcacttgccggaaaaacatgtcacctggcgtggtgagacaatccccggtagcctgtttgattttgcgctctatttcttccacaactatcaggcactgttggcaaagggcagcggtccctatttctatctgccgaaaacccagtcctggcaggaagcggcctggtggagcgaagtcttcagctatgcagaagatcgctttaatctgccgcgcggcaccatcaaggcgacgttgctgattgaaacgctgcccgccgtgttccagatggatgaaatccttcacgcgctgcgtgaccatattgttggtctgaactgcggtcgttgggattacatcttcagttatatcaaaacattgaaaaactatcccgatcgcgtcctgccagacagacaggcagtgacgatggataaacccttcctgaatgcttactcacgcctgttgattaaaacctgccataaacgcggtgcttttgcgatgggcggcatggcggcgtttattccgagcaaagatgaagagcgcaataaccaggtgctcgacaaagtaaaagcggataaatcgctggaagccaataacggtcacgatggcacatggatcgctcacccgggccttgctgatacggcaatggcggtattcaacgatattctcggctcccgcaaaaaccagcttgaggtgatgcgcgaacaagacgcgccgattactgccgatcagctgctggcaccttgtgctggtgaacgcaccgaagaaggtatgcgcgccaacattcgcgtggctgtgcagtacatcgaagcgtggatctctggcaatggctgtgtgccgatttatggcctgatggaagatgcggcgacggctgaaatttcccgtacctcaatctggcagtggatccatcatcaaaaaacgttgagcaatggcaaaccggtgactaaagccttgttccgccagatgctgggcgaagagatgaaagtcattgccagcgaactgggcgaagaacgtttctcccatgggcgttttgacgatgccgcacgcttgatggaacagatcaccacttccgatgagttaattgatttcctgaccctgccaggctaccgcctgttagcgtaaaccaccacataactatggagcatctgcacatgaaaacccgtacacaacaaattgaagaattacagaaagagtggactcaaccgcgttgggaaggcattactcgcccgtacagcgcggaagatgtggtgaaattacgcggttcagtcaatccggaatgcaccctggcgcaactgggtgcggcgaaaatgtggcgtctgctgcacggcgagtcgaaaaaaggctacatcaacagcctcggtgcactgactggcggtcaggcgctgcaacaggcgaaagcgggtattgaagcagtctatctgtcgggatggcaggtagcggcggacgctaacctggcggccagcatgtatccggatcagtcgctctatccggcaaactcggtgccagcggtggtggagcggatcaacaatactttccgccgtgcggatcagatccaatggtccgcgggcattgagccgggcgatccgcgctatgtcgattacttcctgccgatcgtcgccgatgcggaggccggttttggcggtgtactgaatgcctttgaactgatgaaagcgatgattgaagccggtgcagcggcagttcacttcgaagatcagctggcatcagtgaagaaatgtggtcacatgggcggcaaagttttggtgccaactcaggaagctattcagaaactggtcgcggcgcgtctggcagctgatgtgacgggcgttccaaccctgctggttgctcgtaccgatgccgatgcggcggatctgattacctccgattgcgacccatatgacagcgaatttattactggcgagcgtaccagtgaaggcttcttccgtactcatgcgggtattgagcaagcgatcagccgtggcctggcgtatgcgccatatgctgacctggtatggtgtgaaacctccacgccggacctagaactggcgcgtcgctttgcacaagccatccacgcgaaatatccgggcaaactgctggcttataactgctcgccgtcgttcaactggcagaaaaacctcgacgacaaaactattgccagcttccagcagcagctgtcggatatgggctacaagttccagttcatcaccctggcaggtatccacagcatgtggttcaacatgtttgacctggcaaacgcctatgcccagggcgagggtatgaagcactatgttgagaaagtgcagcagccggaatttgccgccgcgaaagatggctataccttcgtatctcaccaacaggaagtgggtacaggttacttcgataaagtgacgaccattattcaaggtggcacgtcttcagttaccgcgctgaccggctccaccgaagaatcgcagttctaagcaaccgataaacgttgctgactgtaggccggataaggcgttcacgccgcatccggcaatcagcgcctgatgcgacgcttgcgcgtcttatcatgcctacagccgttgccgaacgtaggccggataaggcgtaaagatgcgggtgtgagcacctgaaagtgatcgttaattcgggatgtcagtgagtccgctatatccggcagtgtctggttaaaaaagacagatattgcttcatgttcgttcattaatttccacattctttctatcggattcaggtttggactgtaagggggaaggtaatgcagcctgatatttaccacttccgcccagtctttcactaactgtgaacggtggtaacctgctccatccagaataacgtggattttctggttataatcaggataaacctttcgtatctcattgaaaaaacgggatacattatattcattaatggttttatattcgcagattagcggtgacgtcagtgctttcagattcagcgcccccatgatattcaggcgtgtgcggctgcctgttgtttttactgcttttttctggcctttgcgtatttagtggcctgagtcggatggactccatcaataaaaagaatcggctcatcacccacagttgttttcagttccttataatattcaatgaattgcctttgttgtcctgaatgctttaagcgtagcgattctgttcatagttgtccccggcgccggatacagcatctaccctgcacaggccagacgctatggcttgtattttccgtccgccactggtactgccgtaacccggcttgttcacgtaaaatttttgccgggtcgcttgctcccttcgccggttcacaccagcagtcttcacaggcgttacaaaatttacaacgtcaactgggattaatagctggaggtgaggctggaaaacgggctgcaacggcagcgggtctccgttgcagtgctgatactcttcttcgcagggttatcaataccccggagacgaaacagtcaggcgcgcctcatgtcggtattgatgagtgggcgtggcatcggggccaccgctacagtacgttaatagtcaatcttgatactcaccgtcccctcgtcctgcttcccggccgtgatcagcgtacgctggcgacctggttcagaaaatatccggaaatacaggttgtctcgcgtgatcgcagtggagtctatgcgacagcagcacgtgaaggtgcacctcaggccagacaggtggccgatcgatggcacctgctaaaaagtattggtgatgagcctgaacgaatgatgtacagacatatgcctctgatacgtcttgttgtcagagagttatcaccaaataaatcacctgagccagaaacatctgtgcctgtagcatcgctccgtcgtccggaacgccttaaacagcaaacccgcaaaaaacggcatcagcattggacagaggttatggccctgcataacaagggatgtagtttcagggaaatatcccgtattacaggcctgtcgcgagtgacagtcagtcgctgggtgcgttcaggaacattccctgaaatgtcaacccggcctccaaagcgagggcttctggacccatggagggagtggttaaaagagcaacgagaaagtggtaattataatgccagccggatatggcgggaaatggtggcccagggggggacaggcagtgaaaccatcgtcagggatactgttgccaaatggcgtaaaggctggaacccaccggttactactgccgcaagacttccttcaatgtcccgggtaaggcgctggttgatgccctggagaataatcaggggcgaagaaaattatgcatcccgatttattagtctgatgtgtgaaaaagaaccggagttgaaaatagcacagcaactggcactcgagttctaccgtattctgaaaacccaaaataaatcacagctaagcagctggttcactcgagtccacgaaagcggctcagcagaacttcggtgcgtggctgcggggatggaagctgatgctgcggctatatgtgaggcaatcagcagtcgctggagtaatggtgttgtcgaaggtcatgtaaatcgcctgaaggtgctgatacgccagatgtatggtcgagccggatttgaactacttaggcggagggtaatgagtccactggcatgaaaatcttcacctaggttgcggaagagccacttttgcactgttcgtgacagtatggcctttatgtactcactttgttaccggtagctgaatcatcactaccgtgctgcaaatggtggtgaacagcatcaattgtggaatgaatgttgccgaagcgaccaatgcgcctcgtttccaccatcagtggttgccggactagctgcgtgttgaaaagggtttttttctctgaaaactaccgaataaaatatactgatagactgctgcctagaatttccagatcaggtgggctgcaagttgcagaccgttataatcatcggttggggtgttgaaccacactttacctgccgtcaacccgagattaagttgctcagtcagcggttgaattcgttgcaaactgatgctcttcatgctgccgtagcgtgtttctggcgtccagtcgtaggtgtaagcacctgttccgcggcttagccatagttgcgtataaccagcaccgcgcgggtccttcagacgcacggaaatcatattgctataactactacctgcatcgctggagtcataatgggtatagcggtaactggtgatcaccgggccagtatagagtgatatgccgccttgccaggcattgacttcgacatcatcgtaatatttagtgtagcgataaccggtcgtgaaaagcgtttttggcaacagggctaggttaatatcctgacgaaaatcctggcaggcaaagaccggcgtattatccgcaaaggcaatactcgttcgggttgtcagccagttattccatttgtaccagactgcaccctggccgcgagtggcattgaaatgttcagtttcataatcacgacgcccctgggaaagattaaaaagcagcgttgcgttttcaacttttgctaccagttcagcatacgctaaattacggttgccatgttcgccagaataatcggtaaaatcgtagcccgcggtaatggaagttaacccggcataagcgggcaatgcactaaaaaaaaacggcactaataacgtatgctttatcattttaatctcctgtacggataagttcttgtcggagtgaataagttccggtaggtaaattacgttctacaatcacgcgcgggccaagttgtgtgttcggagaaataattcgcccaggcaaaataataacttgtacaccaaggcgtgaacgcttcccgatataacaacctaatttatcgcatccggtagcgataattccctctggagttcgaacagacacgggttgttcatccagacgatgattactggtacgtacttgtgcgcccaaatatgcctggtttgcaactaccgagtcggcaataaagcattgcggaccaatcgttgcttccgcttcaataaccgcatttttaatttcggtggcaaaaccaatttttacgccattgctgattattgtgccaggacgaataaacgcataattacctatcaggcagtttgcgccaatcactaccggcccctgaataacggcaccgtggcaaatacgggtattcgcgccgataacaacctcaccggcactttcatcaataatcacctggtctgcaatctgaacatttttctctttagcattaagcttcagaaagtttttcagttcctgtgacagaagggtgggaataagcggttgacgcttccaccagtgcggaatagcgggtgggtttgtcgcgctgaggttcgcgtccagtaaaaaaggcaataagtccataaataatccagatggcataagctaataatacatacacaacggaaagcggtgctaaaggcaccaacaaccagcaacgatgaaaccaggcgctaaatgcaccaataacacaaactacgccgacccagataagcgggaacattgccaacaccacaccatgtggcccggtggtgatgaattcattaaaccaggtagtgagataaataccaacgccataaagcacaaccaacagcataggaaatatactgaagataccgaagcggctaaataaaagtcttttatgcaggcgcatacagaccgcgtagcccacaatccaacgccgccagcgacgccattcctcacgcgggctgttgcattcctgtgggtatacgatgcagcgattcgcctgccgaatacgatagccgtttgccaccaatgtccaggtgagatcaaggtcttcgactttagtacgatccgagaaaccgaacttacgcaatacatcagtacggaacatcccgcaggcaccgctgataataaacggtgcgccgcccagaagctgctgtagcgtgcgcttcataacaatcatcggcaactttacggtcgcgcggatgtgtggtaacagacccgcgcctttcaacgcagtagagggaatgccgcctacggcatcagcgccacgctcaatttccgccagcatatagcccattccgtcttgatcgggcggaacataggtgtcggcatcacttaaaaaaacctgatcgcaggtggcgtaattgaggccattcatcagcgcaccacctttaccggtatttttttgcgtgacggcaacaaagcggtcgccccatttgcgtttgacttccgccatgaccgcttcggtattgtccgtggatccgtcgttaacgcaaattacccggcaaaaataagggttacgcagcagattatccagtgactgcgccagacacgggccttcgttataagctggtataatggcgtcaatacagcctttcttttgacagggtttacgtcttagcgtacttaaaaaccatagcaacattgctatggtcatgaagataaataacaaagttttcatttctattactccgttacaacaccatcttatggacaacaaaaccttcacacatagaatgactaacctgttgtcctcggaatttggcttgagcaattatgtattctggctgtatgtatcttcgatggatctggcttttatgcttttgtaatgctaatatttttttattaaaatggacctcatctacagattcaaaaacttgaggtaaaaatgacagacatgtacttggtgtttcgtatcctagtatttgaggaatataacgacaggcaaccattgatgcctgataaacagcaatgtgatcctgatgcctgtcagtattattcatggtgtaaactcgagtaatttccacatcctggggcgtttcattctcaattatgtattccagagatgatatcatctcttttatttgcaaatataatctggtatcttcaaaatttagagggattagtttattgcatcctaacatatttaatgcttcttgtgattccttgtgacgatcaatatactctgcgccacagcaaccaggtgtcatgacaacagatataatatatactttttcattagaataatatgaaagagatgcaccacatcctaattctatatcatcaggatgggcaccaattgctaaaatgccggttctttttcccgaagatgttgtacttcgcgactgttctggtagaagaaggcttctcgacgctggaagaactggcctatgtgccgatgaaagagctgttggaaatcgaaggccttgatgagccgaccgttgaagcactgcgcgagcgtgctaaaaatgcactggccaccattgcacaggcccaggaagaaagcctcggtgataacaaaccggctgatgatctgctgaaccttgaaggggtagatcgtgatttggcattcaaactggccgcccgtggcgtttgtacgctggaagatctcgccgaacagggcattgatgatctggctgatatcgaagggttgaccgacgaaaaagccggagcattgattatggctgcccgtaatatttgctggttcggtgacgaagcgtaataaactgtagcaggaaggaacagcatgacagatgtaacgattaaaacgctggccgcagagcgacagacctccgtggaacgcctggtacagcaatttgctgatgcaggtatccggaagtctgctgacgactctgtgtctgcacaagagaaacagactttgattgaccacctgaatcagaaaaattcaggcccggacaaattgacgctgcaacgtaaaacacgcagcacccttaacattcctggtaccggtggaaaaagcaaatcggtacaaatcgaagtccgcaagaaacgcacctttgtgaaacgcgatccgcaagaggctgagcgccttgcagcggaagagcaagcccagcgtgaagcagaagaacaagccaaacgcgaggcacaacaaaaagctaaacgcgaggcccaacaaaaagctaaacgtgaagccgcagaacaagcgaaacgtgaagctgcggaaaaagacaaagtgagcaatcaacaagacgatatgactaaaaacgcccaggctgaaaaagcccgccgtgagcaggaagctgcagagctcaagcgtaaagccgaagaagaagcgcgtcgtaaactcgaagaagaagcacgtcgcgttgctgaagaagcacgtcgtatggcggaagaaaacaaatggactgataacgcggaaccgactgaagattccagcgattatcacgtcactacttctcaacatgctcgccaggcagaagacgaaagcgatcgtgaagtcgaaggcggccgtggccgtggtcgtaacgcgaaagcagcgcgtccgaagaagggcaacaaacacgctgaatcaaaagctgatcgtgaagaagctcgcgcagcagtacgtggcggtaagggcggaaaacgtaaaggttcttcgctgcagcaaggcttccagaagccagctcaggccgttaaccgtgacgttgtgatcggcgaaaccatcaccgttggcgaactggcgaacaagatggcggttaaaggctctcaggtcatcaaagcgatgatgaaactgggcgcaatggcaaccatcaaccaggttatcgatcaggaaaccgcacagctggttgctgaagagatgggccacaaagttatcctgcgtcgtgaaaacgagctggaagaggcggtaatgagcgaccgtgacacgggtgctgcggctgaaccgcgcgcgccggttgtgaccatcatgggtcacgttgaccacggtaaaacctctctgctggactacattcgttcaacgaaagtggcctctggcgaagcgggcggcattacccagcacattggtgcataccacgttgaaactgaaaacggcatgatcaccttcctggacaccccggggcacgccgcgtttacttcaatgcgtgcacgtggtgcgcaggcaacggacatcgtagtcctggttgttgctgcagacgacggtgtaatgccgcagaccatcgaagctatccagcacgcgaaagcggcgggtgttccggtggtggttgctgtgaacaaaatcgataaaccagaagccgatccggatcgcgttaagaacgaactctcccagtacggcatcctgccagaagagtggggcggcgaaagccagttcgtacacgtatctgcaaaagcgggtaccggtattgatgaactgctggatgctatcctgctgcaggcggaagttctggagctgaaagcggtacgtaaaggtatggcgagcggtgcggttatcgaatccttcctcgataaaggtcgtggtccggttgctaccgttctggtacgtgaaggtactctgcacaagggcgatatcgttctgtgtggcttcgaatacggtcgtgttcgtgcaatgcgtaacgaactgggtcaggaagtgctggaagcgggtccgtccattccggtggaaatccttggcctgtccggcgtaccggctgcgggtgatgaagttaccgttgtacgtgacgagaagaaagcgcgtgaagttgcactctatcgtcagggtaaattccgcgaagttaaactggcgcgtcagcagaaatctaaactcgagaacatgttcgccaacatgaccgaaggcgaagttcacgaagtgaatattgtcctgaaggcagacgtacagggttctgtggaagcaatttccgactccttgctgaaactgtctactgacgaagttaaagtgaagatcatcggttctggcgtaggtggtatcaccgaaaccgacgctaccctggctgcggcgtccaacgccatcctggttggcttcaacgtacgtgctgatgcctctgcacgtaaagtgattgaagcggaaagcctggatctgcgttactactccgtcatctataacctgatcgacgaagtgaaagcaagcatagagagggattgcagtttgcagcaatccctctttgcagacctttaatccgttgaccggaggcgctaacatagcgcctcatttttttgcgggtgatgatatgcgtgtgttactggctccgatggagggtgtacttgactctttggtgcgggaattactgaccgaagttaacgactacgatctgtgcatcaccgagtttgtccgcgtggtggatcaactgctgccagtaaaagtctttcatcgcatttgccctgagctacaaaatgccagccggacaccatccggtacgctggtgcgcgtgcagttgttagggcagttcccacagtggctggcagagaacgccgcccgtgcggtggagttaggctcctggggcgtggatcttaactgcggctgcccgtcgaaaacggttaacggtagcggtggtggggcaacgttactgaaagatcctgaactcatctaccagggtgcaaaagcgatgcgcgaagctgtaccggcgcatttgcctgtcagcgtaaaagtgcgtctgggctgggacagcggtgagaagaaatttgaaatcgccgatgcggtgcaacaggctggcgctacggagctggtagtacatgggcggacaaaagagcagggttaccgcgcggaacatattgactggcaggcgattggcgagattcgccagcggcttaatattccggtgattgccaacggtgaaatctgggactggcagagtgcgcaacaatgcatggcgatcagcggctgcgacgcagtgatgattggtcgcggggcgctcaatattcccaacctgagccgtgtggtgaaatataacgaaccgcgaatgccgtggccggaggtggttgctttgctgcaaaaatatacccgtctggaaaagcagggcgataccgggttatatcacgttgcgcggattaaacagtggttgagttatttgcgtaaagaatacgatgaagcaacggaattatttcagcatgttcgggtgttgaataattcccctgatattgcaagggctattcaggccattgatatcgataagctgcgataatagtggaatcgcagcttatctgagacaatgaatcgttgttatatgttgattcatcatcttgttgcgctcctttcatgagctaagccacatattgccactggcgcaaggagcgcgcagggggaggacaatcgcctcctccccctgcaccccgggctctggcgaacaaaatcgccgctgcgcggtaccttcagcttatccccttcggctaccgggtcgggcgcgaggtaacgtccttgtaagacgcgccctcagcccacatccatgtgggctgccccggccttcggggaacgcttcagcgattttgacgccaccaacaccggagctgtttgcaaatcaagtacacaaaatatcgagttactgacctgacaacttatatgccatatctgatttttaaaatatcatcttaaatacgccagtcaccaccagtagcccaatcaggaaaataatcaatacagcccagagtataattttcattggcgttcctttatttgtgagtgctgaataagtataggaaaaaacgaagccctttgccgctattcataaacgattaagataaatcgggagatatcattcgcttagtgtatatttttctggatatgtcgttttattgccactgatgtattgccacgcgaaactaaaaaatatatcgcaacacacggtaatctccgcgcaccttttcttacctgattattcccccatgaatcgtgattctttttatccagccatcgcctgttttccgctgttactgatgctggccgggtgtgcgcctatgcatgaaacccgccaggcgttaagccagcaaacacccgcggcacaagttgacaccgcattacccacggcgctgaaaaatggttggccagacagccaatggtggctggagtatcacgataatcaactcacttccttaattaataacgcactacagagcgcaccggatatgcaggtggctgaacagcgcaggccagcgtgcaggtgacgaacaccggtaaacgcgaaggggccacggtagtacagatgtacttgcaggatgtgacggcttccatgagtcgcccggtgaagcagcttaaaggctttgagaaaatcaccctgaaaccgggcgaaactcagaccgtcagcttcccaatcgatattgaggcgctgaagttctggaatcaacagatgaaatatgacgccgagcctggcaagttcaatgtcttcatcggcactgattccgcacgcgttaagaaagccgagtttgagttgttgtaattttcgatgtttgtaggccggataaggcgtttacgccgcatccggcaagaaacgccgggcaaaatatgccctttaagtatttatctgattctgcaactgaatccgtccagacaggctaaccctgtcattatcaactatgcttttctcttaattcgctgaaaacaacagtaaaagaatgaggaaagcatcatgccactctcaaagctctgggcaggttcactggttttgttggcagccgtgagcctgccgctacaggcggcttcccccgttaaggttggttcaaaaatcgatacggaaggcgcgctgctcggcaatatcattttgcaggtgctggaaagtcacggcgttcctacggtaaataaagtgcagctgggaacgactcccgtagtgcgcggggcgatcacttctggcgagctggatatctatccggaatatactggcaatggcgcgtttttctttaaagatgaaaacgatacggtatggaaaaacgcgcagcaaggctatgagaaagtcaaaaaactcgatgcagagcaaaacaagttaatctggctgacgcccgcgcctgcaaataacacctggaccatcgccgtgcgtcaggatgtggcagagaaaaacaaactcacttcgcttgccgagctgagtcgttatctgaaagagggtggcaacttcaaactggcagcctcggcagagtttatcgaacgcgccgatgccttacccgcgtttgaaaaagcctatggctttaagctcggtcaggatcagttgctgtcactggccggtggtgacacggcggtgacgatcaaagccgctgcccagcaaacttctggcgttaatgccgcaatggcttacggcaccgatggcccggttgcggcgctggggctgcaaaccttaagcgatccgcaaggcgtgcaacctatctacgcgcctgcgccagtggtgcgtgagtcggtgctgaaagagtatccgcaaatagcacagtggctacagccagtcttcgccagcctcgatgaaaaaacattgcagcagctgaatgccagcattgcagtggaaggactggatgccaaaaaagtggcagccgactacctgacacaaaaagggtggacgaagtaatttcccgtgacttatttccgtattaatcctgttctggcgctgctgctgttgctgacggcaatcgcagcggcgctgccgtttatcagttacgcacctaatcgtttagtttcgggtgaggggcgtcatctctggcagctgtggccgcaaactctctggatgctggtgggcgttggttgcgcctggctgacagcctgttttattcccgctaaaaaaggcagcatttttgcactcattctggcgcaattcgtcttcgtattgctggtgtggggagctggaaaggcggcgacacaactggcgcaaaatggtagtgcgctggcgcgtacctgcctcggaagtggtttctggctggctgcggcgctggcactgctggcctgtagacgcataaacatcttccacatgcccttcacgtatgcggttttgtagtgcgcgccagtaatcagcgcggaacaagtcggcgtgcatctcttcaaatagcggaccaatacgcgggtcggcacataaccagtgacggaactcttccgggaaaacatcgcccggcgagacgctgtaccacggttcgctggcaagttcgtcttccgggtagcgcggcagcgggatgtcgcggaaattcacttccgtcatgtagcaaatttcgtcgtaatcataaaacaccacgcgcccgtgacgggtgacgccaaagtttttaaataacatatccccagggaagatgttggcagcggcaagctggcgaatggcgttgccgtactcttcaatggcatcacgcaattgctgcccctcaacttgctcaagccagatattaagcggcaccatccgtcgttcgatatagagatggcgaatcacaatttgttcgccgagatcggtgattttttccgctgcttcctggagcagtaattccattaatgccggggaaatatgccgcttctccagcacaaagttttcaaactcctgggtgtccgccattcggcccacgcgatcatgctctttcaccagttggtagcaggcacgaacgtgagcggcagacatctctttctgcggcgcgaacctgtctttgatgactttgaatactcgatcaaaacccggcaacgtaaacaccaacatcaccattccacgaatacccggcgcttcaatgaactgctcattacagccctgtagataaacgagatattcgcggtagctttcggttttggcgtgcttctggcagccgatagccatatacaattcagcggtggttttacctggcagaatttcccgtagccactcgaccagcgctgcgggcagcggtgcataaaccataaaataagaacgcgcaaagccaaaaacaatgctcgcttcggcggtcgtcgtcaggcaggtatcaataaataactcgccgtcgtccgtctggtggatcggcaataaaaatggcaacgtgccggaaggcgtgatcagtttgcccaccagccaggctgccttattgcggtaaaacagttcgttcgccacctgtaaatgactttccgcgaggttgtctgtccccagcgtttccgtcagatggcgaacgatgtaatgaatgtcacggcttttattctgccaacgcagacgcagcggcagatcgctgataacgcgcatcagcagagattcccagccgtgatcggggtgaaagtctttcgccagtgggcgtggaatggtacgaaagcggcgctctggctgggagctaaagataaaaagccgctcgggagtaagcgagcggtggtcaaataaccgacagtacacggagttgaaaaagctctccgcaatctcgaagcgcgggtaatctggcaacagccgggtgtaatgctctttaacgcgcagtaaaaatgccgcgtccgtgctttggccattagtaatgcagcgcagttgctccacgaccagacccacgtgatgatcgtaaagatgaatacggtttttcatcgcctgctggacagcatgccagtcggcttgctcgaaacgctgctgcgccccggaagtcacttcgaggaatcgaccatactgagcgtcgaaaccttgcaaaatggtttgtgcaatcagtaattccaggccacgcggcatttgttgccctcgtcgggagcagagaattgccggataagacgcgtaagcgtcacatcaggcgctgattgccggatgcggcgtgaacgccttatccggcctacgttcggcaacggctgtaggcatgataagacgcgcaagcgtcgcatcaggcgctgattgccggatgcggcgtgaacgccttatccggcctacattcggcaacggctgtaggcctgataagacgcgacagcgtcgcatcaggcgttgattgccggatgcggcgtgaacgccttatccggcctacagtcagcaacgtttatcggttgcttagaactgcgattcttcggtggagccggtcagcgcggtaactgaagacgtgccaccttgaataatggtcgtcactttatcgaagtaacctgtacccacttcctgttggtgagatacgaaggtatagccatctttcgcggcggcaaattccggctgctgcactttctcaacatagtgcttcataccctcgccctgggcataggcgtttgccaggtcaaacatgttgaaccacatgctgtggatacctgccagggtgatgaactggaacttgtagcccatatccgacagctgctgctggaagctggcaatagttttgtcgtcgaggtttttctgccagttgaacgacggcgagcagttataagccagcagtttgcccggatatttcgcgtggatggcttgtgcaaagcgacgcgccagttctaggtccggcgtggaggtttcacaccataccaggtcagcatatggcgcatacgccaggccacggctgatcgcttgctcaatacccgcatgagtacggaagaagccttcactggtacgctcgccagtaataaattcgctgtcatatgggtcgcaatcggaggtaatcagatccgccgcatcggcatcggtacgagcaaccagcagggttggaacgcccgtcacatcagctgccagacgcgccgcgaccagtttctgaatagcttcctgagttggcaccaaaactttgccgcccatgtgaccacatttcttcactgatgccagctgatcttcgaagtgaactgccgctgcaccggcttcaatcatcgctttcatcagttcaaaggcattcagtacaccgccaaaaccggcctccgcatcggcgacgatcggcaggaagtaatcgacatagcgcggatcgcccggctcaatgcccgcggaccattggatctgatccgcacggcggaaagtattgttgatccgctccaccaccgctggcaccgagtttgccggatagagcgactgatccggatacatgctggccgccaggttagcgtccgccgctacctgccatcccgacagatagactgcttcaatacccgctttcgcctgttgcagcgcctgaccgccagtcagtgcaccgaggctgttgatgtagccttttttcgactcgccgtgcagcagacgccacattttcgccgcacccagttgcgccagggtgcattccggattgactgaaccgcgtaatttcaccacatcttccgcgctgtacgggcgagtaatgccttcccaacgcggttgagtccactctttctgtaattcttcaatttgttgtgtacgggttttcatgtgcagatgctccatagttatgtggtggtttacgctaacaggcggtagcctggcagggtcaggaaatcaattaactcatcggaagtggtgatctgttccatcaagcgtgcggcatcgtcaaaacgcccatgggagaaacgttcttcgcccagttcgctggcaatgactttcatctcttcgcccagcatctggcggaacaaggctttagtcaccggtttgccattgctcaacgttttttgatgatggatccactgccagattgaggtacgggaaatttcagccgtcgccgcatcttccatcaggccataaatcggcacacagccattgccagagatccacgcttcgatgtactgcacagccacgcgaatgttggcgcgcataccttcttcggtgcgttcaccagcacaaggtgccagcagctgatcggcagtaatcggcgcgtcttgttcgcgcatcacctcaagctggtttttgcgggagccgagaatatcgttgaataccgccattgccgtatcagcaaggcccgggtgagcgatccatgtgccatcgtgaccgttattggcttccagcgatttatccgcttttactttgtcgagcacctggttattgcgctcttcatctttgctcggaataaacgccgccatgccgcccatcgcaaaagcaccgcgtttatggcaggttttaatcaacaggcgtgagtaagcattcaggaagggtttatccatcgtcactgcctgtctgtctggcaggacgcgatcgggatagtttttcaatgttttgatataactgaagatgtaatcccaacgaccgcagttcagaccaacaatatggtcacgcagcgcgtgaaggatttcatccatctggaacacggcgggcagcgtttcaatcagcaacgtcgccttgatggtgccgcgcggcagattaaagcgatcttctgcatagctgaagacttcgctccaccaggccgcttcctgccaggactgggttttcggcagatagaaatagggaccgctgccctttgccaacagtgcctgatagttgtggaagaaatagagcgcaaaatcaaacaggctaccggggattgtctcaccacgccaggtgacatgtttttccggcaagtgcagaccgcgtacccgacaaatcaaaaccgctggattgggcttgagctgataaattttgcctgcttcattgctatagctgatggtgccgttaaccgcatcgcgcaggttaatttgcccatcgatcactttgttccagtctggtgccagtgaatcttcgaaatcggccataaagactttcacattggcgttgagcgcgttgatcaccatcttgcgctctacaggtccggtaatctctacgcgacgatcttctaagtccgaaggaatcccgcgaattttccagtcagcataacgaatggaagctgtttccgaaataaaatcaggcaacattccgttatcgatatcctgctgctgctgaatacgcgctgccagaagtttattgcgttgtggcgtaaaatgcgtcaccagctcagtcagaaattctaccgcttcggcagtaagaatttgcttctcctgctcgccatacggccttgtaaaagccagttcatcgattgttgttgcctgttcagtcatcgtgcagctcctcgtcatggatccgaaaacttccccactgtgaacgaaggatcgttgtgcgcttttcgttcagcacaactaagactactcatttaaaatgcaaaatcaaaaacaatttccattttaattaaaaatacatgttaacttattgataacaatataaataaaatttattcacttactgaggtgtgtttcggaaataaaaaaggcacccgaaggtgcctgaggtaaggtgctgaatcgcttaacgatcgactatcacagaagattaatccagcgttggattcatgtgccgtagatcatatggcgtgatctggtagacgtaatagttgagccagttggtaaacagcaaattaccgtgactacgccagctcgctcgcggtgtattttgcggatcattgtgcgggaaatagttatacggtacatccgggtctagcccggcttccacatcgcggaaatattcctgcgccagcgtttgcgcatcatattcgggatggcccgtcacaaaggcaatgcgcttatctttgctggcaaacagatatgcatccccttcttccgtctctgccagaatttccagatcggtataatcacgaatcaacgctgccggaaagtcagcatagcgcgaatgcggtgccaggaatgaatcatcaaagccacgcgtcagaagcgcatgaggatggagaatatgatgctcgtaaacgccagagagtttgtcggtgcgggtttgcttaggaataccatagaggatattgagcgcggcctgtacagcccagcagacaaacagcgtcgaggtgacgtgatctttcgaccactccagcacctgtttgatctgcggccagtaagcgacatcattaaactccaccaggcccagtggcgcgccggtaactatcagaccgtcaaagttttgttcctgaatatcttcaaagttacagtagaagttattcagatgctctgcgggcgtgttgcgcgattcacgggaatcgatgcgcaaaagctgaatatcgacctgcaaaggtgagtttgaaagcaggcgcagaaactgattttcagtttcgatcttcttcggcatcaggttaaggataagcacctttagcggacgaatttcctgaccagacgcgcgagaagttgtcatcacaaagacgttttcttcacgcaagaaattgacggcgggtagctcgtccggcacacgaatcggcataacctgattacctcactatatacgcttatacgtttagacatccagatagctgaagataaccagaaaatttaccaatgtcgagcctgcatgttgaaggtgagaaagtttcaaggaaaaggctacgttagaatataagaatgacgaaaaggagagaaaatggttattagtattcgccgctcacggcatgaggagggggaggaactcgttgcgatttggtgtcgttctgtcgatgccactcacgattttttatcagcagagtatcgggccgagctggaagagctggtgcattcctttctgccggaagcaccgttgtgggtcgcggttaatgagcgggatcagccggttgggtttatgttgttaagtgggcagcatatggatgcgctgtttatcgatcctgatgtgcgcggctgcggcgtgggccggatgctggtgaagcatgcgctctcaatggccccggaactgacaaccaatgttaatgagcaaaatgagcaggcggttgggttctataagaaggtgggctttaaggttacggaacgctctgaggtggacgatttggggaaaccgtatccgttgctgaatctggcatatgtgggggtgtaggcggtttttttctcatcccggtgggctgaactttaggtttcgtacccaccaatggtgacatgattatttctgcttaaacattgccaggaccgcactatcactgagtaccactgattgcgcatggatgtggaactggcgatatttcattaacgttgcccctgcgaccacttcatgaagaatgcgttcctcaacctgtgacaaaccgccctcattcatttccagcgcgctcacaacaatatccatacgttttgctggcaaaaaagaatgccaggttgaacgtgggtggagttgcagaacaagatcttgcagaactttttctgcaacaaagaaattggcgattaacaggcgctggttactgaaggcagcatctcctgacacttcacgtttgctttcaagatcgcgaacagtaatttgattacgacgaatttggatatacagaactgacatgagattcccttcatcatgcaaataattgatatgcaaaaaaccccggccttattgaccggggtttttctaatttgatgcctggcagttccctactctcgcatggggagaccccacactaccatcggcgctacggcgtttcacttctgagttcggcatggggtcaggtgggaccaccgcgctaaggccgccaggcaaattctgtttcattaacccgcttgtcgccggttaatctaatctgtatcaggctgaaaatcttctctcatccgccaaaacatcttcggcgttgtaaggttaagcctcacggttcattagtaccggttagctcaacgcatcgctgcgcttacacacccggcctatcaacgtcgtcgtcttcaacgttccttcaggaccctcaaggagtcagggagaactcatctcggggcaagtttcgtgcttagatgctttcagcacttatctcttccgcatttagctaccgggcagtgccattggcatgacaacccgaacaccagtgatgcgtccactccggtcctctcgtactaggagcagcccccctcagttctccagcgcccacggcagatagggaccgaactgtctcacgacgttctaaacccagctcgcgtaccactttaaatggcgaacagccatacccttgggacctacttcagccccaggatgtgatgagccgacatcgaggtgccaaacaccgccgtcgatatgaactcttgggcggtatcagcctgttatccccggagtaccttttatccgttgagcgatggcccttccattcagaaccaccggatcactatgacctgctttcgcacctgctcgcgccgtcacgctcgcagtcaagctggcttatgccattgcactaacctcctgatgtccgaccaggattagccaaccttcgtgctcctccgttactctttaggaggagaccgccccagtcaaactacccaccagacactgtccgcaacccggattacgggccaacgttagaacatcaaacattaaagggtggtatttcaaggtcggctccatgcagactggcgtccacacttcaaagcctcccacctatcctacacatcaaggctcaatgttcagtgtcaagctatagtaaaggttcacggggtctttccgtcttgccgcgggtacactgcatcttcacagcgagttcaatttcactgagtctcgggtggagacagcctggccatcattacgccattcgtgcaggtcggaacttacccgacaaggaatttcgctaccttaggaccgttatagttacggccgccgtttaccggggcttcgatcaagagcttcgcgttaccgctaaccccatcaattaaccttccggcaccgggcaggcgtcacaccgtatacgtccactttcgtgtttgcacagtgctgtgtttttaataaacagttgcagccagctggtatcttcgactgatttcagctccacgagcaagtcgcttcacctacatatcagcgtgccttctcccgaagttacggcaccattttgcctagttccttcacccgagttctctcaagcgccttggtattctctacctgaccacctgtgtcggttttgggtacgatttgatgttacctgatgcttagaggcttttcctggaagcagggcatttgtcgcttcagcaccgtagtgcctcgtcatcacgcctcagccttggttttccggatttgcctggaaaaccagcctacacgcttaaaccgggacaaccgtcgcccggccaacatagccttctccgtccccccttcgcagtaacaccaagtacaggaatattaacctgtttcccatcgactacgcctttcggcctcgccttaggggtcgactcaccctgccctgattaacgttggacaggaacccttggtcttccggcgagcgggcttttcacccgctttatcgttacttatgtcagcattcgcacttctgatacctccagcaaccctcacaggccaccttcacaggcttacagaacgctcccctacccaacaacacatagtgtcgctgccgcagcttcggtgcatggtttagccccgttacatcttccgcgcaggccgactcgaccagtgagctattacgctttctttaaatgatggctgcttctaagccaacatcctggctgtctgggccttcccacatcgtttcccacttaaccatgactttgggaccttagctggcggtctgggttgtttccctcttcacgacggacgttagcacccgccgtgtgtctcccgtgataacattctccggtattcgcagtttgcatcgggttggtaagtcgggatgacccccttgccgaaacagtgctctacccccggagatgaattcacgaggcgctacctaaatagctttcggggagaaccagctatctcccggtttgattggcctttcacccccagccacaagtcatccgctaatttttcaacattagtcggttcggtcctccagttagtgttacccaaccttcaacctgcccatggctagatcaccgggtttcgggtctataccctgcaacttaacgcccagttaagactcggtttcccttcggctcccctattcggttaaccttgctacagaatataagtcgctgacccattatacaaaaggtacgcagtcaccccattaagaggctcccactgcttgtacgtacacggtttcaggttctttttcactcccctcgccggggttcttttcgccttttactggaaaaagaaggtatggttcagcgctctccgttaagacgaggcatggcaacatactggtttctgaaaggagagatgcaggcgggacagagctgttcttccacaacttaataactcagtttgtgggcatgcttcactgaaacagataaaagttacatcagagtgcagattcaattttgcagcattcgtcacaaaataaaaatccagcattttatgtcagaatacctcacatgataataaaacctgtccggttttactgcatggccagacattatacaaaagcaaatcctgtaaactccattcagcctccttgctatccggtaacggaggctgttttttcgttacgcctttccccggcagcatcagtagcagtaatttatagattctacgaactgagactgtctgtccggggagaacatacgtaacccggcgcaaggctcctgtcaattacctccggcctctgctcccttggttgccagacagagtctctgacgaccatgctttcagtgtcagcgccagtgatataagacggtaaatggggatgcggacgatttcctgtatcacgtctgttggcgcttagcctcagaatatccaccaccagacgctgactgtctgaccaaaacaggccgttcagtgcgatcacctgcaatcccgtttccagcgcatacttcagtcgttcacggggcgctttcacttcccgggcaatttgctgccatggcgatgatgtattttcactcccaaccatccggcgaatacgatgagacagatgataccggaatatatccggcacaccagaaagactggctttcaggctgtacacgcagccaaaccgtttatcgttgaacaccacatttttctggctgatatcccatgcttcccgaagtgtaacaatcagctgtggcgtccgggttaaaagcagacgaaaaggcagttcaaaactggtgacgtaatccacattcagcaatgtaatatgcagccgttcttctgccccgcctcagtctgccgacactcctccactgctggcgaagacgtgaggattaattccgccaaggtaaaacagtatttatccgccatagagtcaattcgtgtacacatactgaaaagaattccgtataaagattcagcagacaaaactttatcagtctgtaaaaattaacggaagagttgatatttctcccgatcatcaccggataattgttgcaataaccagtggcatcagagactgaacagctgtttttaacgcaacgtattgctctgatgtatcaggccgggtaacccgaaaacacctttccacccgacattgtccgccagcgtttatcccccgccaggcctgctgcagtaaatccaccacttgcgaacattcttcatcaactgtggcactgacccgcagatggcaaatgctcgcctggctgagcagcaacaggcatcgtattgttgctcctccatgttgttcccgcaaccagcgtaataccaccggcggtgctggactggcagtgtgattacgctcagtaatatgttcttgcacctgtcggtaaaaggcagtacagaatgcatgaatctgttgcccgttgatgtttccttctgccgaatggagtgtgaagtaaaatgccagcaaatgcggccagtggtccaccgcctgctgaacaaaacgccggatgtctcccggctctgaaattaaggcttcggttatttgcacgaaatcttccttttcaaaccctgttggattttgtcaagccggtgcagacacagtaaagcgcgcatcaacacctgaaaggtacgatacaaacacaagttacaaacaataataacggaaggacaattaatcagtgaggaataataactaaattaatcagtgaggaataataactaaattatagtaatatatttgttaatattataaattcagactgagtatgatatcagaaaatacattagttaatgtaagaacagatgcccagtaagacatatacacaatacatccacaaacacactcttttcattaaataaatcacctgattaaaccatgaaagtgtgatgtaagtcaaaattactgacacaatcaattgataatgattatctctatcattatcgtgatattcgagaatgaaaggagaagtagtcattataagccttttataaatcgtcatcatcatagtaaagtagaacactttttatatgagttgctatatgaaaatatactggacaagaaaaagcattcctgaacattcagcacttccaccttcattaagaaagaaaaattttactgacgcatataatgctgcatcttcccatatcgaatactggataggtgctggcgtctcatttatctcgatgatgattttattcagagtatatgactttcttttacccgcccaagatactttcccgggtgatatcatcagaagtttatgtgttgtgtgtccatccatattaatctggtttcagttttcggtatatgtcatgaggaaatattacagacatattctggaacgaggtaaggaaaccgaaaccatttcagaaaggttgatacgtgaggctgatacacgagaatatgaactatggcgtccggtccatcgttttttctccattgtttttctcattattctattagtttgcattcattcactgataacaactataaaataaaagttatggctgttctgatacaggaaaataaacgttcattctatggttacctcttcctgttatataaaagaattttaaacaacaagtaagggaatataaatggaaatgacaaaaaataaaaatgcaactataaaaaaacagtcatcagccggctgcttttcaatgtttactttatcattttctattacctttattcctgcatttcttacaaacaggcaggaacttatatccaggggacttcttgttccagcattatttcttgctgaatttctaattcttgttccactgtattttattttcttccgaaaaagagaaggattaggaagaggttcttttcgactggatgttttttttactcttttctctttaataatgattattcagttatttgtcccttatctgctggcagtgaggaaaacggaagaatggatgatctcgcaaatgtctttttccggagccattttatggattaatatattttcttctgtacttcttgttcctgtatatgaagagattgtatttcgagggtgtctttttaactcttttaaattctggtttaatgacaatatttacacctctgctattgtaacatcagtcatattttctgcattacatctacaatatactgactttcatacatttttgatgctctttctggtatcgttagttcttattagtgcaaaaataaagtcgaatggcctgttaatgcccatattacttcacatgtcgatgaatgcagtcatagcaggaatacaatatctggcttctatcagttatactcattaacagagcattttctgttacaatctcatatgataaaaattaaacggactggcattgttactatgcggtatgcataaaataataaacgttcggaggagcctaacttaaagcgttacataggcaccattatcatataatgaagcacctgtaacaggtgcttcattaacaatataaggtttaacttccactccccgcagacgaagaggcacttgatgtacctctgcttctccttgtcaaatatcgggctgatactgtcattagcgtgcgcagggtcacggctcaggttcgccagattctgcttctgattgtccctgtcccggatggtgatagtgccttctgccactgcggcctgagtcgttccttccgcatgtccgctgtgacctccggcggatatcatgccacccggcatgttaccctgaaatttatccccgaagctgccaccaccgctcagactgattccactgtgactgactttataatccgcttcgttgtgaaggtcactgaaccccagcgttccggtatccaggtggtttttatccggtgtggcagtggaggcaatcaccgcaccatccagttgggtatgtctgcccactgtgatgtcgaagccaccatcaccggcaaacattccggtttgttcagcaacggagtcaaagcggctcttcatcttatcccgggaggcagcgatgtaacctgagccggtcatggagccaaaggtaaaactgccgccggcagccacgctggtctgtttactgtcgtacttactggtgtcctgctggctgcttatcagcaggtcgtggcccacatcggcgataatcctgttgccgttgacctgagcaccgttcagtaccgtatcccgaccactgttgatggtgacggttttaccgctgtctgttgtggtttcagtccactcagtaccgttacctttctccctgccttttgccgcattaacgctggcaaaggcgctgataccggcacctttacctgcaccgatactgacacccacgccaccgccactgctgctgttcctgcccgttgttttttgtgtgtttgcggcgccactcaacagaatatcattcgcggcatccaggcttgtgttaccaccggccttaagctggcttccggcaatcacaatatctccgcggttatcgcccctgtttttaccggttgcgacaacagacagattattcccggcattcagcgtactgccggatactgtgtcactttcagaatgttgttgtgatttcgatttctgggtggtgagcgacaggctgactcccgtcgcattcgggtcaccggttgcggaggccattgtcgcagcctgtccggcctgcacaccagacagcgctgtctttgtggcctgcagggctttcagacggctgtcactgctctccttcgtctcctgtgcactggtaaccgcattattgatggcactgcccaccgtgccggaaagggcaaccgtcagcccgcttttcttctgctcaaatttttcgtccacagtacgacggtcatgccccgggtcaaccaccacactgtcaccggtaatgctgatatcccggttcgcaatcacatccgaaccgctgatatgagcctgtttgcccgcggtaatactgacattaccggcagtggagccgatggtgctggcactctgactctgcgttgtcccggcctcgcgccggtcgtggcatcaatcgctcccagcccggcaagtgtcgcctgcaggacgggcagcacgccgtaaaggatcaaggcgataatcgctggtttcagaccaaagccgatcaccggaacggcaatcgccagcaccgcgacgggcggaaaagtctgcccaacggcggcaatagtttccaccagtgggcgaaattccgcaccccacgggcgagtgacagcaattccggcaccagtaccaatgatcaccgcaaacaaactcgaaattcccaccagccagaaatgagccagtgccagagctgcaaagctttcctgctgataaacgggtcgtggcagttgtgggaacaaggcagcaaacagcggctggctgtaaggcagccagaaaatcagcgccacaaacagagcaatcagccagaacagctgatcgcgcaacatcttcatacgattacgcctcctccagcagatcctgaaaatgcagcgtgccgcaaggctcgccctgcgtgttcaccaccggcagcacttcacatccccgcgcgacaaacagggagagcgcatcgcgtagcgtcatctcttctgccagcgcctcaccttctgcccgttcttcgcgacgcacgtaatccgccacgctacgtaacgaaagcaggcggacacccagttcactatgcccaaaaaactggcggacaaaatcattcgccggatgagtcagcatcgccagaggattgccctgctgcacgacttcaccgtgatccatcaataccagatgttctgccagccgtagcgcctcatcaatatcatgagtgaccagcacaatagtgcgcccctgcaaacggtgaatgcgcgtcatctcttgttgcaacgcgccacgcgttaccgggtccagtgcgccgaatggctcatccatcagcaagacttgcggatcggcagccagcgcgcgggccactcccacacgttgctgctgaccgccggaaagctgatgcggataacgctcacgcaaatccggctccagccccagcagcgccattaattcgtcgatacgatcgtcgatccgcgcccgcgaccatttttgtaattgcggcacggtggcaatgttttgcgccacgctccagtggggaaacaggccaatagattgaatggcatagcccatccggcggcgcaactccagcactggcagcgagcgaatttcttctccggcaaagcggatcacgccactgtcatgctccaccaggcggttaatcattttcagagtggtggatttaccggagcctgatgtaccaatcagcaccgaaaaactcccctcctgaaaattgagattgagatcgttaacggctttttgtgtgccgaacagtttgctgacatggctaaattcaatcattacgtttcaccttcagcagtgcgataagcaaatcgaacagcgcgtcggtaagcaccgccagaacaattaccgggatcacccccagcaacactaaatcaatggcactgcttaacagcccctgaaaaaccagcgcaccaaaaccgcctgcgccgattaacgccgcaatcaccgccatgccaacggtttgcaccatcaccacccgcaggctgcgcagaaataccggtaacgccagcggtaactgaacatgcaggaaacgctgcgtcccgctcatccccatcgctctggcgctctccagcacatcgcgcgggatctggttcaagccgactactacgccgcgcaccagcggtaacagggcatagagcaccagtgcaatcagagcgggtgtcattccggttcctgctatgccgagcgttcccagccacggaaaggccgtaaccagcgcggcaagcggcgcaatcaacaggccaaagagcgctaccgaaggcacggtctgaatgacattcagcagagaaaaaatcgccccttgccgcgcggtggaaaagtagcaccagatgcccaacggcacaccaatcactaacgcaggcagcaccgcaccaaacagcaacgtcagatgttgtgccagcgcgtcgtcaaacacatcctgacggttggcgtattctttcattaacgagagatcgttaagcgtgccggagtacagcaaccacagcggaacaatggcaatctgcatatgcaacaaccagcgccacagcggatgcgtggagattcggcggatggcatcgctacaggccagcagtgccagcgccgcagccagccagaaaccacttccgaggcaggtacgcgccagcgcactaccattttgcgccagttgtgtcgccgcctttccagctccccacaccagcaatacgaagacgaattgcgccagaatgagtgcaaaaatgctgccttttttagcgggaataaaacaggctgtcagccaggcgcaaccaacgcccaccagcatccagagagtttgcggccacagctgccagagatgacgcccctcacccgaaactaaacgattaggtgcgtaactgataaacggcagcgccgctgcgattgccgtcagcaacagcagcagcgccagaacaggattaatacggaaataagtcacgggaaattacgtcggctgccacttttttggcatccagtccttccactgcaatgctggcattcagctgctgcaatgttttttcatcgaggctggcgaagactggctgtagccactgtgctatttgcggatactctttcagcaccgactcacgcaccactggcgcaggcgcgtagataggttgcacgccttgcggatcgcttaaggtttgcagccccagcgccgcaaccgggccatcggtgccgtaagccattgcggcattaacgccagaagtttgctgggcagcggctttgatcgtcaccgccgtgtcaccaccggccagtgacagcaactgatcctgaccgagcttaaagccataggctttttcaaacgcgggtaaggcatcggcgcgttcgataaactctgccgaggctgccagtttgaagttgccaccctctttcagataacgactcagctcggcaagcgaagtgagtttgtttttctctgccacatcctgacgcacggcgatggtccaggtgttatttgcaggcgcgggcgtcagccagattaacttgttttgctctgcatcgagttttttgactttctcatagccttgctgcgcgtttttccataccgtatcgttttcatctttaaagaaaaacgcgccattgccagtatattccggatagatatccagctcgccagaagtgatcgccccgcgcactacgggagtcgttcccagctgcactttatttaccgtaggaacgccgtgactttccagcacctgcaaaatgatattgccgagcagcgcgccttccgtatcgatttttgaaccaaccttaacgggggaagccgcctgtagcggcaggctcacggctgccaacaaaaccagtgaacctgcccagagctttgagagtggcatgatgctttcctcattcttttactgttgttttcagcgaattaagagaaaagcatagttgataatgacagggttagcctgtctggacggattcagttgcagaatcagataaatacttaaagggcatattttgcccggcgtttcttgccggatgcggcgtaaacgccttatccggcctacaaacatcgaaaattacaacaactcaaactcggctttcttaacgcgtgcggaatcagtgccgatgaagacattgaacttgccaggctcggcgtcatatttcatctgttgattccagaacttcagcgcctcaatatcgattgggaagctgacggtctgagtttcgcccggtttcagggtgattttctcaaagcctttaagctgcttcaccgggcgactcatggaagccgtcacatcctgcaagtacatctgtactaccgtggccccttcgcgtttaccggtgttcgtcacctgcacgctggccgtcactttgccgtcacgcttcatggtcggcgcagaaagtttcacatcagagacggtgaaagtggtgtagctcagaccatagccgaacggataaagcgccccgttagcttcatcaaaataacgcgaagtgtatttgttcggcttgtcggcattatacggacgcccggtattcagatggctgtagtacaccgggatctgcccgacagaacgcgggaaggacatcggcagcttgccagacgggttataatcgccaaacaatacatcggcaattgcattactgctctctgagcaggctgaagccctccgtcagagagatctgcaactgagtctggttgaagagacggaggccttcctgcgctctgcactggcacgtgccgaagaaaagatcgaagaggaggagcgggaaatagaatatctgagggcccagatagaaaaactgcgccggatgctgttcggtacccgttctgaaaaactgcagcgtgaggttgaacaggctgaggcccaactgaaacaacgcgaacaggaaagcgatcgttacagtgggcgggaggatgacccgcaggttccccgccagttgcgacagtcacgtcatcgtcgtccgttaccagcacatcttccccgtgaaatacaccgcctggagcctgaagaaagttgttgcccggagtgtggcagtgagctggattatctgggtgaagtcagtgctgagcagctggaactggtgagtagcgccctgaaagtgatccgcactgttcgggtaaaaaaagcctgtacaaaatgtgactgtatagttgaagcgccagcgccgtcccgcccgatagcgcgcggcatcgcgggctccggattacttgcccgcgtgttaacgggaaaatactgcgaacacctgccactgtatcgtcagagtgaaatctttgcccgacagggtgccgaactgagccgtgcattaatctccaactgggttgacgcgtgctgccagttaatgactccgctaaatgatgccctgtaccgttacgtgatgaacacccgcaaggttcacactgacgacacaccggtaaaagtgctgacaccgggcagaaaaaaggcaaaaacaggacacatctggacgtatgtccgggatgaccggaatgcgggctcatcagagccaccggcggtctggttcgcctactcaccagacaggcagggaaaacatccggtacaacaccttcgtcccttccggggtatcctgcaggcggatgcattcagcggttacgatcggctgttcagtgccaaacgtgaaggtggtgcacagacagaagttgcgtgctgggtcaataacccccgaaaaatacacgatgtatgaacgacatctcttctgacgacatcttcctgctaaaacagcgcctggccgaacaggaagcgctgatccacgccctgcaggaaaagctgagcaaccgggagcgcgaaatagaccatctgcaggcgcagctggataaactccgccggatgaacttcggcagtcgttccgaaaaagtctcccgccgtatcgcacaaatggaagccgatctgaaccggcttcagaaagagagcgatacgctgactggtagggtgtatgacccggcagtacagcgtccgttgcgtcagacccgcacccgtaagccgttccctgaatcactaccccgtgacgaaaagcgactgttgcctgcggcgccgtgctgcccgaactgcggcggttcactgagctatctgggcgaggataccgccgaacagctggagttgatgcgtagcgccttccgggttatccggacggtacgggaaaaacatgcctgtactcagtgcgatgccatcgtgcaggcacctgcaccttcgcggcccatcgagcggggtatcgccggaccggggctgctggcccgcgtgctgacctcgaagtatgcagagcacaccccgctgtattgccagtcagaaatatacggccggcaaggtgtggagctgagccgttcactgctgtcgggctgggtggatgcatgctgccggcagctgtctccgctggaagaggcgcttcatggctatgtgctgactgacggtaagctccatgctgatgacacgcctgtcccggtgctgttgccaggcaataagaaaacgaagaccgggcggttatggacctgcgttcgtgacgaccgtaacgccgggtcaacgctggcgccggcggtgtggttcgtcttatcaacaatcgacatctccattatatcaatcataacagatggatgatacctttattagatgtaaaaagataaagtattttagatattactaatatatattagatatctttggatatagcacataatatacatttccaacgcacaagccaagtattctaattaacattagagttatgaaaaattcgatataaacacaacagcagggcaagaaatttaaccaacatcttattttacgatcgaggattaataaagaacataccaacgaggcatatttttaacggattaaataatgcatttccttctcttaatagttaatagtatataacaatacattagtcacatttaaacaaatcgcgactatagactttgtcgaccacatcgttcaactcctctgacattcggttagtgataataatatcagctttccctttaaagatcgccagctcccgttccaaaggtgagttaaagaatgtatctccagaaataagcggctcataaataattactttcacgccttttttcttgatacgctttataataccaagaatagaagaatctctaaaattatctgaaccacttttcataatcaaacgataaacccccacaacttgtggtctatgtttcaaaataacattagtgataaagtccttacgtgtacggttagcatcaacaattgcagatataagtttattcggaacagactgatagttggctaataattgcttggtatcttttggcaaacagtagccaccataaccaaaagaaggattattgtagtaattaccaatgcgcggatccaaacaaacaccgtcaataatctgacgcgtattcagaccaaaactttctgcgtaactatccaattcattaaaaaatgcaactcgcatagccaaataagtatttgaaaataacttaatcgcttccgcttccgtagaatctgtaaataaaacgggtatattttgtttaatcgctccttcctgaaataacactgccaaacgttctgcccgttcagaacattcaccgataataatgcgagatggatggagattatcgtatagggctcttccttctcgtaaaaattctggagagaagataatattattaatacctaaatgttctttaattgtttttgtgaaacctactgggaccgtagatttaaccaccataattgcgtttgggttgatttccgttacgtcacgaatgacagcttcaacgcttgatgtatcaaagtaatttgaacctgggtcataattcgttggtgtagcaataataacgtaattggcatttttataggcttcatatttgttagtagttgcgcgaaaattaagtattttagttgaaagataattttcaatttccttatcctctataggagagagtttatcattaagtaagtcaacttttttttgatgggtatcaaatgcaaccacttcatgattttgagccattagaattccatttgaaagcccaacgtaaccagcgcctgaaacagttatttttagtgttccgaacattttatatagccccaaaaatttaatatatatagaataacaaactattgttcaattattcctgatacatctttaaacaaaccatagcgagataataaaccacgtacatctttatcacttacgatacttttccctaacactcgttgtcttgccgcgatatcactatattctcttcgagattgtgatatatatccatcaggtagagcttctgttcctttattcctggtaagtccggagtctccccataaccccaatatcaatggctgcagtaatcttacaatactttctcgcccataacgcattattactgtttcataaaactccgtatctgcaccaattaaagattgtctatagccaccaactgtcgcaaaaatatctttttttatcattgacgatacaacagacattcttgtggctttatcatcatagaagaattgaatttttccatttgacgcaacacggatccagttagccatacagattacagccttattattgcgaagaacctcaacttgtctttgtattctctccggatgagaaagatcatctgcatcttgaaaggtgatgaaattaccgtgtgctttttttattagctcatttcttatattataagggccttggttttttcgtgagctatatactttcactcttgaatcagaataagctatgctcttaattatttcaaggcttttgtccgatgaacaatcatcgcacacgagaatttcaatattttcatatgtttgattcaacaatgaatgtaatgagtatgcaatagtatcttctgaattgaatactgacattattatactaacaagatcttttccataaacattttttttcttatcgaacttaattccttgcaatataattttatttgggtatatatcagttatttctgataaatcgtattttcgtagacatttgttaaattgactcctataaatattcatattatctattacagcattacaaataaaaagttcttgctcagggagtagattataactatcttgcatatcatcgtttgcatttaataataaagtcaggccataccctgcatcggcttgattatcaaatgctaaatatttatatccatttttagtataatcatgaaattttgaaaacttcgtacaaaaataaaaatctttttgtttgggcgacaattttagatggtttatatattcgatatatcgttcaaaaataagattaatgagaaaatcactccttgaataccgtagagcgttacttatatgttcaaaaagcttaactcgttcgccatttttaaaataacgagattgaattgttagataacaaacaattttaatataagtatccaacataccaacttttctaagagaatctgcatatcccaataaataagaaaactcattgccagaattctgagctgatacattcttagatagttcaagtacattgtcgtattcgtttattcttttgtgaataaggttatcgttaccttttaaaggcgagtttttatgttgaagatcaactttctccttatgaattgataataaaaaatcaagagcaccaatatttgtccctaatttctttttacgttcaactaaatttatatattctgcgttcatacattcacttaatgataaataaaatgagaataaaactgcatttactaaatattataaatataaatctttaaaaacatcactaaaactcaacgaatgtcacagtgtaagctcacagagatattgcaattatctccggacaagcgagggaaatgctaagttgatgcaacgtatctgcggcggatatttgaggcattaccatgccaacatctatgtgatgaaacactttgttatacctgagattacaaaattaaggatgaaaaaatatacttctgggagaaacatgagatcaatacagttgcggaagtttttgctgtatccacacgaacgctgtattatggcccagaggcacctatttcgcgtagcaaagctccgctagtacatcgcacaaagcaatggcatctcgtaattctgtaagaaatacgtcgactgagaatagagcttcccaacctagaagaacagatttttgtttgcttgaagccgtggagtgaacagcaccgcctggtctgtccgagcatttcaaccatcggcaggatgttcacggccgcacacgataaaatgcgactgataccgatgtgactgcctccccaaggaaaaacactgttcataaaaaatacaatcctccaacccgcagatcaaaacgctatcgcccggtaaagagcagtgagctcgttggtatagatgctattgagctcagaatgggcgagctgcgctgttatgtcattaccatgatcgacgaacacagcaactacgctctggcacaggccgtgccgtcacttaactgtgatatcatcaaactcttcttttgccgtgcagaccggctattccctatcgatatcaaccagggcatcgcagataacgggaaagagttcccaggaaacttcgacaaagcaccgcaggaatccgctagcaagccctatggacctacccctttacgcctagaacgcacctctgaacgttttaagcgaacgccgaaagaacagttcattgaatttaaataaatagactctttaaagagctaaacatatttaatcagaaactagctgaaaacctagtactatactgcagtaaaagacagcatgaagtgctcgaattactgacaccagaagaaaatattttacgagagaacaaaatttgcaatatgtggcgaatctatacggtcacttgcaaaagtataaattggtattataatgcgtgatattatataaataaaataactaactattttaacgaaagcaaaacaccacaaagagaaaaataaaatttgcaatatatctcattagggttcacatttttaacagcccttgattttagctctcctatatttataaacaacaacaattaacttaaatggaagggtaatgaatccaaatatcgaattagcactggagataatagcctgccctaattgataagataaatgtttcttaactctttcagccttatcagcatcagcatataaatagagtggcacatcaacgccataactcttcttacgttttttttcaaaaacacactcacggataagtgcaaatggcatggtaataatccccttgagggatttagaatacgagactataatataaccaagtcgataacctaactcttgttttatctgctcagctgctccatatagcacaggtggaagtttctttttaatttcctgattttctataaaatagtgttccaactgctcttgcactatatgcaattgttttaaaatctgttctttttctgatattgcctgagtgagttttgattctttttcgcttatctcttcttcatatttatgcaattgttttaaaatctgttctttttctgatattgcctgagtgagttttgattctttttcgcttatctcttcttcatatttctgtatgtcatttatttttttttcaatatcatctggatatttttcttgtctcacaacatcgttgtgatttatttttgaaagtttaattacctcttccttttctttttttagctcattaatcctgttcaataataaaaattgtcttttcttaaatatagatttagtcaattcaatatctgcatccttcttttttgactcttgcaccaaatgagatacaatattgaagatagaatttctctcttcgactacctcccataatgcagcctcagccgaaacgttatctttcgatgtttctatataaggtaggtttgcataggcttgtaactcattataaagcttcagaacctcggttctttcttttattaattcagatactaagtactcactaacctttgtatcattaaatgtaatttcagtctcatttgcacttaaagaaaataaagttgtatatttttcaagcagggcaatttcatttgattttgtataatcattattctcaaccacatcaaacaatattgaatttttgtaatgcgcagacattagattatctatttttataatattactcaatggctttataatatttttcttattgctttgaaacgcctcaaaattaatcaacacacatcgttctttattctccaaaaaaaaatcaagcaatcttttattatatgcaatccagttatctacactattatttatatttaaagagagaggggcattatttactgaacgcattaaattatatttagggtgatcatatatcatgatgaattttatgcttttatctatatttttccaaaaatcaagaaaaaatattatagatggatctgcccacccccaaagtttgttatttagattgttcatcattagttcaagaaccatgctatcccacatggttgagacttgaacagctgagaattctctctcatctactacatcattaacttctggtgtttgataaaattgacataatgaagcggtgatatattctggggaaattttattacttgtagaataatttggtgagttcatgccaatttctttcaaaaaatgttcaactatctgatactttgagccaggatgtccgactagcactaatttattcatcatatttcctctttattatctacaagattactttattttaaacactgtcgtttatcgtaatggtgatattgcagacatatatttcaaatctgtaatgtaatttaggtggcgttatgtgataatactaaatgaaactatctatatctcaatagcacatctgatttatttggtatagccattcatcaataaacaatatcaatataactcagagcacctcctaataattgacatattgcgttaccaccttcttttagacaaaaatcttaattataaactctaccaaactaacgctgatatttttcaaaatcataagcacggattaccttgtactgttaaggagtcgtttgacgtgcaagggtggttaaccacgtccggtgcccattatctgaaagataaccgggcgacgcaggatgctccttccatcgcacgcttacgcgctgccggggcgatcctgatgggaaaaaccaatgtgccgatgatgactgccgattggcaaacctataacgatctgtatggcaccacccataacctgtgggataggcaacgttcacccggcggatcgtccggaggagcggcggtggcggtggcggcggatttcacccccgtggaatttggcagcgatttgtttggctcactgcgcattcccgcacactacacaggtgtctatgcccatcgttgtagcttggggttgatgtcggtcagaggacatgtgcccggtggtggtccgcaagcgactgatgagccggatctctcgacggcgggccccatggcgcgcagcgcggcggatctgcgtctgatgatgcgcgcattgagcacattctgggtggaaccgccgcgtattcccgattttagccgttatcaggccaaagcaaactaccgcgtgtgcacgtggtttagtgcgccccaccatgagatagatcaacagatcgcacagcgttttcaatcgtttatcgacaagttacgcgcacagcctggcgtggaggttgatgatgctatgcccgccgatatcgatcccgacgcactgtttgatatagcagtcaaactcagtggtcggctggtaagtacggcgctcaatggacgccagcgtcttacagccgggctggctgcgctgggcttcaggcttgtgggcaagctggcggatgtgcctgaggggataacgagctattaccagggcatgctgaaagacagtggcgaacagcggaatacagacaaactccgccacgaatacagccgggtgatagaaacccttttcgcgcgttatgacgtgttgttgacacctgtcagcccggtgctggcgtttgcgcacatgcagcagccggtgcgtaagcgcaagcttatcgtcaatggcgaaccgcaagattacaacgaacatttgttctggaacatgttagcaacggtttttggtttgcctgccaccgtttacccattggcgaaaacgatggatgagcttccgtgcggcatacagatcatttccgggcattttcacgatgatgtgacgattaactttgctgagttctgcgaaagcatcagtggcggattcacggtaccggaagggtactagaggcggatatcggtgacagcgccaataaaggtgcggcgcatttaatgaataaggagcaggtatgacggtgaataagcttgagccagacaacggcacgccgaacgatgagctgttcacggtggcgggtatgtttgacggctcgctgtataaattactcctgcgcatggcgttgccgatgtttgtcggtatgttaacgcaggtgacctatgccatcgccgatattttttggctgagccacattgatgtcaccaacagcggcatcattgccggtgtggggctggttttccccgttggaatggggttatttgccatcgccaacggcattcaaatcggtatgggatctttgctgtcccgcgccatcggcatgcagcggttggatcgtgcacagcggattttgtcggtcggtatcatcatcgcgctattctttgcgatcgtgatcaccgtacttggctatgtttatgcccagccgctattgcgctcactgggggccacgaagagcatcatcggctacgcaacggagttctattattattcgctgctgaccgtgttcagcatcatgttgattggcgtcatgatggggctgtttcaaggcgcgggtaagatcatggtcatcatgaaggcctcattgttgggggcgttggtaaatattatgctcgatccaatcatgatctttgtattcgattttggtgtgaaaggggtggcattggcgtcgtttctggcgcaactgagtatggtcgcctatttcatctacacattgatgggattacatatcgggttgagtatacgcatcgcgttacgcccattctcctggaaaatctaccgagagtttctctccgtcggcatggcgcagatgctgatgcaactgatcattgcggtcggcatagtgatttataatttttttatcgtcaggctggacgtaaacgcgatggcagcgtttacgctcactggtcgcatcgactatttcatcatcacgccgatgctggctatcgcgaccgcgttgctgactgtggtggggcaaaactggggacacggaaatgtcacccgcacgctgaatgcctattgggccgccgtcgcgctggccttctctattgtgctggtgttagccgttatgcatattgtactggcaccctggatgtatcccctgtttactcgtgttgttgccgtgagtgactatgcggtactgcaaacccgtatcatggcactggcactaccctttgtcgctatcagcctgttagcaagtgaatattatcaggccattggtaagccttgcccgctcgagcagttacacaacaggctgcatacattaatccagcagcagccagctttgcacagtgcgctggacgctgaggggcggttgctagtatgcgaccctaatgtgtgttatcccaacgaggtgctcacggaatattcgacggcgcagtggacgttggcagaggtgatcgctcagtgcaatagcatgcttgacgtgacaaatggtcgagtctttacggcagctctgttacacgccccgcagcctgcgtctagcacgctggtactctgtgcccatcacttgtgcgtcgatatgcactcttggtatttaatcctcagcacgctggacgccgtcagcactgtcaatggcaccagcaacagcggactgcatcgctggaatgactatctggcgagcaaaacggtagattccgccacacacgaaagctggcgcacagtatgtcaaacgctaccgctgcatttcccacccgtgtcattgccagatgactcattacctcgtacgcgcgcttggcgtgaagactttcgccatccttgcgtcaggaggttgtttgaatccagtggtaataccgcgtacagcgccgaaacctatgtgctaacggcattggcgctggtgctgcgttactacagcgaagagccttggtgtcgcatcgagatggaaggcatgggacgcggctgctggcccgatgagcctgacgttgcggatacggtcgggtggtttactctattttatccttgggcgatccctctgcatggcgatatggcgacactgttatctgcgatcgcttccgatttggcaaaacgcacgcatggtgggggagattacggtctgctgcaaatgcggcatgcaccggaagactctcttgcgcaagggatccgaatgaattacatcggtgtgcaggcgcaaccttcactccgctattttcatattgatcactttaatagtgatatctataccgcgcctgaaaacgcgctcccggcataatccgtcgccagccgccgcaacgcgctgtcgctggcggcgctgagcagcagcgcggtactttttctgccgctatccgtattggggaggcgcgcgttgagcgcgtcgggcagcgaggcgacgatcatatggcagttggtgccgccaataccaaaggaggagacgcccgcatagcgcatttcgtcctgccatgcctgtgccgacaccggtatggtaaaggggctctcttcaagtttcagcgccgggttgggggtgtgaaaattcagtaagggaggaatttgcccgcgactgactgccagaacggttttcagcagtccggcaatgcccgccgcggtatccagatggcccatgttacttttcacggaaccgagcgcacagcgctgatcctgcgggcgaggcgcatagacgttgcgtaacgcttcaatttcaatcgcgtcgcccagcggtgtgccggtgccgtgggtttcaatgtaacctacctgcctgtcgtcgatggccgccagcattaacgcctcttcgatgactgcctgttgccctgcgacggaaggggcggtatagccgacctttctgttgccgtcgttgttgaccgcgctggagaggatcaccgagataatcggatcgcctgacagcagcgcgtctctcaggcgacgcagcaccacgcagccgagaccgttaccggcccaggtgccctcagccgaggcgtcaaagggacgacagtgaccatcaggagagaaaatcattccgggctggtagcggtagcctgcctgctgggggaaagagagcgccacgccgccggcaaccgccatatcggattcgccagcgcgcaggctttcacaggccagatgcacggcaaccagcgagctggagcaggcggtctgtaccgataacgccgggccgtgcaggttgagtttgtacgcggcgcgggtggcaatatagtctttatcattgcccatcagagattgcagaccttttacctgcgcgacttctgtcacgttcaatgcttcgcgaccggggtaggtactcatccgggaagaggcgaaaacgccggtcttatgggggacggcgccgggggcataaccggcatgttccagcgcatgccagaccgcctgcaaaaacaggcgctgctgcgggtccatcgactccgcttcctgtcgcgaatagccaaacagggtggcgtcgaagcagtcggcgttgtctaacaccgtaccgatattgacataatgaggatcgtcaatgatggcggcatccagaccgacggccagaagctcttcgcgcgtaaagcgtcggctgcattcacgaccttccagcagattttgccagaacgtttcgccatccggcgattcaggaaaatgtggatgtcgggcgtccgcaaagtcgggggatgcagggcagcgtggtggccaacagccgtctggacgggctgaatatcgtttcaacaaccgcgtttccggtggaaatgcttgagcgcatggatgtgcttaacagtttgaccggcgcgctgtacggcccggcgagcccagcagggcagtttaatttcgtggcgaagcgcccaaccgaagagacgctgcgtaaagtgacgctgggctatcaaagccgcagtgcgtttaccggccatgccgatctgggtggccattttgatgaaaacaaacggtttggctatcgcgtgaacctgcttgatcaggaaggggaaggcaatgtggatgacagcacgctgcgtcgcaaactcgtttccgttgcgctcgactggaatattcagccgggcactcagctacagctcgacgccagccattacgaatttatccagaaaggctatgtcggtagctttaactatgggccgaacgtcaaactgccgtctgcgccgaatccgaaggacaaaaatctggcgctcagcactgcgggcaacgacctcactaccgataccatcagcactcgcctgatccactactttaacgacgactggtccatgaacgctggcgtgggctggcagcaggctgaccgcgcgatgcgtagtgtttccagtaaaatactcaacaatcagggcgatatctctcgttcgatgaaggattccaccgctgccggacgttttcgcgtcctgagcaacaccgccgggctgaatggtcatattgataccggctctatcggccacgatctgtcactttctaccacgggatatgtctggtcgctttatagtgccaaaggaacaggttccagctatagctggggtacaacaaatatgtatcacccggatgcgatagatgagcagggcgatggcaaaatccgcaccggcgggccgcgataccgctccagcgtaaatactcagcagagcgttacgctcggcgatacggtgacatttacgccgcagtggtcggcaatgttctatctcagccagagctggctgcagactaaaaactacgataagcacggtaatcaaacgaaccaggttgatgaaaatggtttaagtccgaacgccgcgctgatgtataaaattacccctaacacaatggcctacgttagctatgccgattcgctggagcagggcggtaccgcaccgacggatgagagcgtaaaaaatgccggtcaaacgctaaacccgtatcgcagcaagcagtatgaagtggggctaaaatcggacatcggcgagatgaatctaggcgccgcgctgttccgactggaacgtccgtttgcctatcttgatacggataacgtgtataaagagcagggtaaccaggttaacaacggccttgagttaaccgctgccgggaatgtgtggcaggggctgaatatttacagcggcgtgaccttcctcgacccgaaactgaaagatacggcgaatgcctcaaccagcaataaacaggttgtcggcgtgccgaaagtgcaggccaatctgttggcggaatacagtttgccgtccataccggaatgggtttacagcgctaacgtccattatacgggcaaacgcgcggcgaacgataccaacacctcttacgccagcagctataccacatgggatttgggaacgcgttacaccacgaaagtgagcaacgtcccaaccactttccgcgtggtggtaaacaacgtgtttgataaacattactgggcttctatcttcccatcgggtaccgatggcgataacggttccccaagtgcgtttatcggcggcggccgcgaagtgcgtgcatccgtcaccttcgatttctgatggataaatgatgaaactctcccgtttatttccgctgctggcgctgctgctggcggccagcctgcacgcagaaaatacgcacaaggaggtgcgtatcgcgtcaccgtggttatgaggtggttgcgggtgccagtgtcggataaacagccatataaacgtaaccacagctgccgagggtgtcggcttcgcaggtcagccctctggcatacagcgtgacggtatgctgatggcggggattcagttcaccgatggtgagcatgagttccagttgtttcatcagcagtggaaaagcctggtccagatggtatgcatccgcgtcgctgaactgccctctgataccggcgcggtcggcaaggtaatgcaactgattgccctcctgcaccagacgtgccccgaaacagggcgtcacggtgcagggtagcccccaccaggggcggtcgttgttgtcgtcgggataatttgtttcatggagcgtgtctgacacgataaagtcctcacagaaaatcggtgaatgatagtttaacgatgacaggtcagccggcgtggagaccggcttcggtgaaggtatatgcattgatgtgaatggcctcatctacagcggtgtctgaggtcagccagtcgtacttgttttccagctggcggtacagccagaaggccaggtcgcgcagggcttcgctgacagcggcttccgcattcggactgttccgggtgacggtgatatccatgctgtacggatggcagtaacgtccccggtgactgatttcagcctgtaactgccagaagttacgtttctgcaccgcctgcagggtatccgcgatacgatgaagctcacggtcctgaggggcatattccctgattttccggggtgtcgctggctgccagtgccagcgcccttcaaaacaggctccgtccccctggctgcagaatccgctgaaccagatgcacggctcttccataaacctgccgttgctgagccggaaaacgcgctggcggaggtcaattccgaaaatgccacagacctccctgaagtcctcatacacgttttcataccagttgctgtcagcatgatgctgacggtaccagtcgcgggctttttcctgtgcggtggaggatagctcatgcagtgtatacacggtggtggtgataattctgctcatcagaatgcccttactgactcagttcagagtgacgctcatcagccggacatacgggccaaaactgtccttacggcgttcagcaaacacggccagcacaccgggaatatcctgcacttcacgaccggtatacgtttcagtgctgccgtgccagcggtatttgccggtaaagaacgggatgcaggatgctgttggtgaatacgcatggcttcgccacgggtgatgattttcatagtgggatacctctgaagacagaagataaaagtgaaaacaggtgtgatgtggttgtgacgggttaaagcagaccatattcggcaaaggagaaaacctggctgccaccgactatcagatggtccggcacccggatatccaccaggcccagtgcctgtaccagacgttccgtgataaggcggtctgccttgctgggtgtgacttcaccggacgggtgattgtgtgccagcaccacagcagcggcattgtgatacagggcgcgtttaatcacttcccggggatggacttccgtgcggttgatggtgccggtgaagagggtttcaccggcaatcagctgattctggttgttcagatacagcacccggaactcttcacgctccagtcccgccatgttcagaatcagccattctcgtgccgcacgggtggaggtgaaggccacgccgggttcatgaagatggcggtccagggttttcagggcccgttgaatgaggctgcgctcgccgggcgtcatctctccgggcagaaaggaaagctgttgcattgtacttctctccattcagtcgatgatgcgcataatggcgctgcattccggatgctgcagggcgtaatcccgcagccggtaataatggaccgtcatggcataacactccgtacgacaggcatgatgactgtacgtcatcagacaggcagcaatgccggcggcttccgggctcatttcagcgcggttaccgttcatggcattgaacagtacccatgtttcgtcatcatcgtcatccggttcgggtgccataaatgccccgccgttgttcagggtgtacagattccagataccaccgcagtagtcttcacacagacggtccatccagccgaagatacggggctccagggtcacccactgtggaatgaggccaaagtgctgcggccagaagctgatgcgccgttcatcagggacgggagtggctaccagtttttgcaggtcagtctccggtgcacaggccgaagaggtggtgttctgagacaatgttttcatgtatgaaatccttgtaatgtgaataaatgagagggagtaaaggtcgggagctggcaacatcacgttcatcactgaccgtgatgacccggtaatatcagggatgaatgatattcggctgaaattccggacagccgtacgcgtaaccgttccggtcacagacggatggccagatgccattgcctgtatactcagtctgcacagactgatttctccgggacggtaaagcagacgggtacaccaggcgcacaggtcatcatcagaaatggaacgacaccccggcagcgcctccggggcgtcgggtgattctggtgcctgaatcacgccttcagggacatgctgcatcagcgcaggctctccagcagcgtttctgccattacccacaatgcgcggttgagcttaatatcggtgtcgatgttgtgaatggcacgggtgtggatacgttttccttttgcactgcggccggaaattccgcctttcagcatattctcctggatggtctgatatgcgctccacaggtctttaccgtaatcctcccggcgtcgtggtgtcagaatgtcagcggtggtgactggctgatgttcgtcaccataacggtaagtcagtgccgcctgtgccagcgcctggcgtgtcggtggcggcaggaccagcgactgcatggcatcacgcttttcctcaatccggtcaaacacgcccaccacctcgtaagccccttcaatgactctgtccaccacatttccccgatgcggaacacgcacttcccccggagactgaccacagacgcatccgttctgacagacgaacctgaagtaacccggcagcatctggtagctggaggtaccgtcatgggagttgagcagaatgatttcagggacatgttctccgtttatctctccggcccgccgcagacgcagcatgtgttttgtgtatccccggcggcccgggtcgcgcacacgggtctggcaggcgaagaatggctgaaagccttcccgctgcaggctttccagtacggtgatggtgggaatgtacgcatatcgtttactgcgggaagtatgccggtcttcaccgaaaatactgggaacatagtgcatcagttcttcgtgtgtcagcggacggtcacggcgtatctggttcgtataaccaaaacgactggctagtcgcataatttgctccttatcggtggttaagatttactggtgtaataaatgaaaaagccacgtctcccggagaagacgcggcctgacagatgaaatgaatgacgtttattgtctgagaagcccttaactggcgagctgagtattaagctgtgttccggcatcaccagcgcaactgaccttcagcattacggataaccagccgggaatatgttccctggtcatcttcagtaaacacattgcggtaagctgttttgacggcaacagcctgttcgcgtgagaaagggccttcgggcaataaacgtgatgtacaacccggcatatctgttgctccctgaaagtaaaaagccccggtcatgatgaccggggcctgaaggagagtgacctgattatcagaaagtcacattcagcgtggcctgaccgttataaccttcagcgctgctgccgctgacgctgtgggcataaccgccctgaacgcccagggtgatattttcccggacacgggcttccagtccggcctgcaggtccagtgacgtgccattccgggacggtgagaacgtcatgttactgccggcggcggctgtacccatgctcatgtctccccgggagctgaaggtgcggataacagaaggctgtacccaccagttcaccggcagttcacgcacacggtgttttgcactgtcgcgcagggtgtcacgggatgaggtgccttcaccaaagctcatatcgttgtggctgcccagacggaaaccggcacgcacatgttgtgcactgccatgcccaaacttcacataaccggcgttatcctggccgtcatccagggaaagtccctgccaggtatactgcagttgtggctccagcatcaggttgtcagtgatactgaagggcagaccggtttccagtgagcccagccagccccagccccgggcgcggaagtcgttattgtccgatgacgctttcatgctgtggcgggttccctgtgccacaatgtcagcccacaggccggaggacgtgtgtgtcagattcaggtatccgcccaggctgccggcatcatcccggaccgtgccggcgcgggaaccgtcatcatccttaacatcaacggaagaatggcctgcggcaccatacacccctgtcgtcagagacataccggcaacctctgttctcagcaggtcaccctccagacggacgaagccatagctgccgctgctttccggcgtggctccacgggcaataccgccgttgttatcgtgaccgagatgaccgccctgaatgctgagacggacgctgttattttcaccgtttacaccggtctgatggctgcgggagcctgccagaatccggtcatagtccattgcctgtgtcagcatggatgtatacagggggacttcagcacgataagcattttcactgcgcaggtaccagtcttcatcgctgtcacggttcagggtgtagttaaaggcgccggcctgaagcgggcgactcagggcaaacgcaccttcttctgtggtagcgccattctgtgcatccacaacccggataccctgtccggtggttgccaccccgaggttactgtttccgacatttgtaaacgcaagccaggttttgccggttgcctgaccaccattaatcaccagctggtcagaggcattgctgccatcaaggcgaacacgcatattgatagtgccaccctgaccggtgaggttactggttgtcagtttatggaacgttaccggggcgttgccttttgcaacagcacggctcagtacggcatccggtgttgtctgattgtcaaagtaaatctcccctgcgttaacaatatcgccggtactgaccacatcaccattcagtaccatgctggcgcctttactgagctgtgttctgccactcagacttcccccggcagccagcatcagtgttccacgatgtccgacagtggtgttgctggcctgtcccccggcattaaccgtaaagctgccgccattttccagcagcaggccgctggcctgaccggatatgccatcaatactgaacttaccgctggcattggtcccctcaacagtggcaccactgtctgcaatcagggcaccaccggatgtcatggtgacacctgttgccttaccaccggcagacactgccagggtaccgccgtcatccacccgtgttttctgcgctgaatggccttccagtacatccaggcgaccaccggactccagaacaacgccgtcagccttaccgttttccaccgtgaaattgcccagacggttgctgccaagaaccgttgccgcagtactggtgaccagtgctccaccctgtttcagggtgacatgtgtggcggtaccaccggcgttcacctgcagtttgcctttctggttaacggtggtattttcagccactgccccatccttcactacctgccagccgtcactgtttacaacagtgccagacgctgtaccgccgttgtgcacatactggtaccccccattcagcgtggtatccagtgcgtgaccatgtaccgtctggtcgccgccggcataaaccacagtggtatttgctgttccttcagcagccacaatctgacgaccatttttattgatggtggtacgtacggcatttccgcgaacaaactgcccggtatcaccattttctgcatccggtcccccttctgcgccggtattcacaaccgtgtcggttgccactgcgccggatttgacggcctgccagcccttctcattaatgacggtaaccgttgcaatcccgccttcatgtacccactgctcaccgccgttcagagtggtattcactgcctgcccctgaaggctctgtccgcctccggcactgataaccgtgtctgaaacgcttcctccggcattcactctctgaagaccaccaccggtgacagtagtgttgttggcgataccgccattttgtatccattgcccgccggtattggcctcgttatccggcccatactccagaccggtactgatggtcattccgttggccgtaccgaagacaatctggttgtcatgatttgtcagtgttccgccgctcacggtttctcccgcctgtacgaccgtgtcagcagccagtaccgggactgacgtgacagcagcaagagacagcgcaaccgccacaccggtgcgttttccccgtgagcgcgccagttcggaagccaccaccagggtgcccgtaatgtgattccataccagcctgtagctggtgttcagatgtcgtttcatcagcttttccttacagagggtgaataaaaaagccggtacccacaaatgtggataccggcaggtacaaaacagcatggtcagataaagtggtttttcccggacataaatgcttcccctctctcatccgccagagaagtatcagtccgttgtgtgcaattccgttctgcatgatgaagagattcagctgcattttcgcagaccattaaccactataaacgatcgatagtaacgatcgatacctgttttatcgatcgttttattctattaacagcaaggcagtcacgcaagagaaagaggtgggtctgaggtgtttgtgtcatgttttcagttggttaacgcaatgtaatcaggcatttcccctggcagagtgttcagaagaaaatccagttccatacagcgcgggcaacagagaccaccgagtcacggacggcacgcagaaccgcgcgtgcaacagaggcaatacagacgctctccgcagtgtcaaatatccggtccaccgcaccggtaaactgttcacgggcctgagaccggacagattccgtgcgcagctcgtcctgcaggcgggtcatcaggggactggcggcatggtcgggaagcgctgtcatgagcgcactgaccagcgtatccagttcccagccggtgcaggccgatacggccacaaccggatgtacgggccggaacagccggaataccgcatctgttttctcacgaatgttctgtgcctgtgcgggagaaggctgaatgccggccatatcccattcatggcagggctccgttttgtcggcctgcgtcaccacaaacagcacctgctgatgtccccggtgcaggatgtgtcgccagaaatactcatccacagacagggcacggtcatcggctttaatcagccacagtaccaggtcaagttcaggcagaatgtcacggtacagggcttcatactctgcatccctgtcccggctctcgcccaccccgggcaggtcagtgataatcatgctgtgaccgtggccactcagacggaagcgccgcacttcccgggtgccggcgtgaacatcactgaccggggtgacctccccctgaaacagtgcattacagagtgaggatttaccggccccgcttttacccataatgccaatcacgggttcgtgactggtgagtttgcgcagatgttccaggatgtgacgggaaagtgagtaaggcagggaggagagcggtttttcaattgcctcaatggcatcagacggattcatacatgtattcccggtgaaaaaagacaaaacccccgcacaccggaaaggtggcgggggactcacggagataatatatgtctgaaattatctggaatgtcggtaccttttatactcttcaacaatcaggtcatgcagcatttcgccggtactgagtcttctgaccctcgataattctttgagctgcgccctggtttctgcgtcaagaaaaaactgtacattgactttatcttcctgcatttttttgtacttgcgctgcgccttggccttattgaaactgtttctgaaattttttatatcgtcaggtgaggtgagtggacaggtaacccatatgtcaaatgaaaggtgaattgcgtggtaaatatcagcagaaccaggaaaactggccagtttttccagtgcaatattttttcccttcaaataattccatgtccatatgcattcatgttcgttctccgggaggaggtaactgaaaggactctttgatttaaatgcccgcatccatctgtctttggtctggattatccactcatcccgcaaattcttatcagaaagaatatcgagaactctgagtatttgtctgaactgtgtcgatgagtccgacgggaaggcattcccttccagatactcttctttaagatacagtttattcttttgaagcaagtctgcgcttatttttgccctgttattctggataaactgcatcaacagataccaggaaaataagcatgcgcgttcactgcccgcgatccaggatattttttccagggggaccaggaaggccagggccttcagacgcataccagaaattatttgttcaagttcaaaatctgaaagtgtgatgttcagattttctctgtttttttttatgtaagcgataaaacgttccgggggatcataaacattaaggggcagtacggagatattacgctctccaagataataagagtaatacgcatttgttctttcattcataaccttatccgacaaaattttctgaaccatcctctttctccggttgcttaaaaattaaacataataaggtgataataacatgataaaaagaagtttataatagtatattaaggtggtcaataaaaaggcaatctgcgcgctgtacagtcattctgacaggaaatgcaggaggaagggaaggtaaccggcttcgttatgctgacaggaatacctgttatcatggaagtgcactcatgtggccgacgtagcttaagaggatggaagagtggagactgcagacagggggtattgaaaggtaaacatgtttcgcccgccagctgcaccgggggccagcatcactttttttacgttgtaacccggtatgcattccggctttgatgattacagtcagagggcagcagactgacgttatttaaccggacagaaaaattatggacactgaaatatcgtctgttaatacctcgtttgtcggtgtggtattccctgtattaccggcgtcaccgataaagagagttataaacgccagaaaggtacctcctttatgccggggaacacttacggaaaatgaagtctgaaaaggagcacaatgaaaagaggcgtgtcccgtaaatataacgaatcatcgcaggatatgcattatcaggtgataccagagggcattaaactgtcgccacggataagaatatacaacatttctgataacaaaacatcataacgtgtttcagatatgttccggcatcagtctgacggatattatttcccgggaaaacaaacctgctactgtgacggttaactgtatctgcataaattatttataatgaaagaacagtattacggattcaaatatcatcctgtttgcattcaggcggacattcccggatgccggaaagaatatcctgcaggctgagtgagtctcttccacagtgccgggatcgctgtcgccacgtacatattgtcaccaggatgggtatgtaccgcagcatgccatttctggtgaataaccgcacctgcacattcagtctgctgagaacctggcgtgcatcgggctgtaaagaacatccctgtccgtggctcctctggtggtgttgcctgctcagcaatgacaggatgcccttaagacgcccgtcatggctcagtatgatgacgacgaacacgctctgcaggtgagcatgcggggccgggagcatcatcatttccgtattttgtcacaccttccggaagcaaccggcatcagttgcggttatcgtcaaccgttgtgcggtatgccaggagcacgtactgatccatcagatccgtcagtgctgcgctctgcctctgacggttgatgatccattcctccagctctttttctgatttccgtttcaggttctctttccagtcttcaaggctgtttccggtcattaaatcaagccagcaaagccagaccagtttgaggcgcaactccgtgccaccaaactgacggaagaggctaatcagtttatttgccagagaacgctgcctcagacgttcacattcagacaggagaatgccttccagcatcggatgatgaaccagcagatgttcactggtgcataaattcactatcagatcatcatccaggggcggcgtggcccgtttgtcagggccataaatcagccggtgcaggctctggggtacgatggcaatctccggtttttcaccattgaatgacacccacccgggcgtcagattatggaagtagtagatattcggatgacacacgccccaggatacggcgtgccgggtgaagccggtcagccatttctggtagctttcgtggagcagttcgtaacgggtctgatactgttgtttcattttcatattcctcacgggggatataacaggcagcagaatgccgccggcaggccggggattacgtctgctgcgggtgaacggataacggtcagaaattacgggcggggctgtgcaatacgcgcctgtagccaggcttccacttcacttttcagccagcgggagctgcggcccagcttgatgggagccggaaaggccccatccctgatgagcctgtaaaaccacttatctgtcaggccgttcagttgagtgataaatgccatgtcgaccatctggtcatccatcagtgaaactggggtggtcatgagaatgttcctccggatgttgttaatctcaaccggcgttggtgatgaaaacaacgcaccaccttcaccggcataacaaccggggagaaacgtaaaaaataatcgggaatgtgaccgtcaggagataaacggggggattgcggtggctgagccgtaccggtatgtcgggtggttgttgcgaaacgatgcttccgcacgcgcacgcgataaaggagggaggactttcgtgagacaaggggaaaactagcgttctgataattgcagagttgtttttgaaggcggttgtggtatatcagcctgtgacctgtgggcaggcgacagttatcactggtgggataagactgtctgattggtattataaatatataagagagatcaaacacatgagatcaaatacatgagttcatatatgtgaaataaacactgtgagtgcgatcagtgggcatgagaacgcagtagcagcagattgcgttgtacccacagggctatctctgatagctggcgtataacctgcgtatataaaacgtacctgcaacacacgtgaacagagtgcattaagcatccgtctgagcggtaaacgtatccgacctggtgagtgacagtctgagagaccggttaagtggtggcacgggagtaatgagtttggggagggtaccagaatgccaggctggtgcggtatgctgacagcatcctgttaaccgcagcataaagtaatgagaggctaatggaagttaaaaccacagcagttccgtcgttgttcatcccgggagacgctggaaaaagtgatttcccacacgcgttataaacttacccctgcggagctggaagcctttaactctgccgttgacaaccggctggcagaactgacaatgaacaaactttacgatcgcgtgccggcttccgtctggaaatatgtcacctgaatcttgaatccgcgctacgatgactccggtgttatctgtgcaccggaagatcgggaacattaagcagtataacggcaacaaagaattcgaaatcaaaagggaatggtgtacagaggggcaggcgttcaggcattaccggcctgtatcttctgaaggggactcgtatttgtcggggctgagtattccgctcgattcgatcacggattggcggaatacctgactgtgattgattcaggtaccattttgcagggagccggtgcgttactgtctggcacaacaaacgcagcgggtcgctctgccccgccgattcctgataatccctcccctgtaacctactgcaacagtacaaatacactgacgcctgaaacggtaaccagaatcagcaccagcagtaacgtcagtaaacagagcagacgatcggtcttccggtaataaccgaaggggtcgacagcgccacaatacgggcaacaaactgtattatgagtaattgcgttaccacagtccctgcacttctttttgcgtatcacgatagctccctcgccacgccttatccgtaaccggttttttacattaaaaaaacaacgccgggaattcaatcgtcagtccggagacgaccgttcgggttatcacagagtgcctgagacagtgtcctgccggaggtcacttcagggactctgcgtattttttacgacgtggctattccgtatgaaccatacggagatttaaccatgacctacaaatacaaccccttctggcagcaacgtattcgtgagacggtgcggcacgcactgaatgttcatccccgcctgacggcattgcgggttgacctgcgtttcccggatgtaccggcagcaacggacgcagctgtgatatcccgcttcatcaatgccctgaaagcccgaatcgacgcttaccagaaacgtaagcatcgggaaggtaaacgcgtgcatcccacaaccctgcattacgtctgggcccgggagtttggggagtgcaaaggtaaaaaacactatcacctgatgctgctggttaaccgggatacctggtgtcgtgccggtgattaccgtgctccgggatcactggccgggatgattaaacaggcgtggtgcagtgccctgggagtggatgtcgggtgccatgccacgctggtgcattttccggcctggccggcggtgtggctggaacgcgatgatgacactggctttcagcaggtgctggaacgtgctgactatctggcgaaggaacataccaaagctcactgcaccggtgagcgcaattttggctgtagccggagttgagcacgactggcgcgccaatacccggcaaaccaaaagtatgggttgttgtctggcggcaacgatgtatccactcgcccactgactgttttttacgtcagtgttccattgtgtgacaaccacagtgctgtaacagcaaccagcctgctttacccaaactccagtccagattttaactgaaccgccattcacaccctgaccacgctgcccgtaccgggacggctgttgcctgcgtgtcgtctggcggctgaggaatatgactatgtacgcaaaatcctttatcgctcttgatggcaacggacgtctgacgggcgcccgtactgcacaggccgcaccttatgctcactacacctgccacttgtgtggcagtgcactcagataccatccgcaatacgacactgaacttccctggtttgaacacactgacgacaggctgacagagcacggtcaacagtgcccttatgtcaggccggagcgcagagaaatacagttgattaaacgtctgcagcaattcgtaccggatgccttacccgtggtgcgtaaagccagctggcactgcagacaatgtcaccacgattattatggggagcagtactgcacacactgccagaccggaggattcagtattccccggacaactcaggaggaaatatgcgaattctgaactgttatatggcgaatgacagcaaaggccattttgttacggcgaaagaagctgcgaagcacaaccgacaggacgttttgtgctgtgtgtcctgtggatgcccgttaacacttcagcggggcaatgacggacaaccaccgtggtttgaacatgaccagatgactgtcgctgaaaaaatcctgctgcgatgtacctggcttgacccggcagagaaagaggcccgtcgtttgcatctgcagggtatgacggttccggattatacggtgaaggtgagaaagtggttttgtgtgatgtgtgacgaagattatgagggggaaaagtgctgcccacgctgcggtaccggggtatacagcagggcgtgggggcggcaggaggtgccgtcggaagatgccagggctgataatccgttacagaggctgtaatggttgcctccggagcagtttgcggtgatgcctttcccgggaatggattgccagtgcggggactgtggagcttaattccggtgttggtggcctttccattgattttatgccaacagccccctgtgactgacaggctgcctcgtcattccattcgtatctccagtaacagggggttgtattgtattttattgtaccggttcaggtgtgcgtttcccggcgcgtctgcaccggcttaaccaaattcaacagggataaaatagtggtaagcgtacagcctgaaccgtctggtcagaatctgacgaattagacaaagtggtgtccaccaaataagtagtgggaaccaaagtgtcagatatgcagaaaaatgtgactcccggcaggcgaaaaggctgccctaattatcctcccgaatttaaacagctgctcgtttttgttcggactgcttatggcctttttccactggtgtagcaggaaagttaaccggctgccaccatgagatgacgtgtaaaccgtgcaggcatgttttcacgtggtgacgctttcattgggggtctacgccggaaccccaatattgttcacatacatgaatttgaaaaactaagcgatactgctgtccgtaccttataaacttatttcaacgcttccggcagcgtcacaatccacagttcactgtcagactccggtttctccagtggcttcactctgagggtcgtttcaacctgcttgtcgtcaagcgtcagctttccttccgcgttcacccgataatccttgaatgtcttgccctcgaccggatgttgcatcgccaccttcacgccaaagtcgttatcgttcgccaccgccagcgttttgctgtcgatcagcgccaacccttcagccttctcctgctgccagcccaaggagcgcagatcaacaacctgcgttttctgcgcaagggtaatgccgcgctgtgacagggttttctcatcatcaaactccggatactcacccggcttgtcgaagcctgacaggtcgctcgccttattgagatcgacctcgtaaatcaggttacgcattctgttgtttttatctcttccctgttcgatcagcaggatgtgctggttatcgagcgccacgatgtctccgattttagcgtcgctgtttttgctgtaggccgcgctgtcgataggataaccgtacatcgcggtttttccgcttgccggatcgaagctcaccagacgcgtaaacagcgcctttttcttgctcttagcgtcgatatccagcgtactttgcacggcgacaataatacgcccgtccggcatacgggtgaggccttcaaagccgcggttcgcctgacgccatttgaggatatttggcaaaccgcccgcaatcgctttttccccttccgccgcctgcggaccgtggattgccaggattttccctttactgtcgatgttaatcaggaacgggccatactcatcgcacagccagtaacctcctttaccatccggagtgatcccttccgtatccagcccgcgattatcccccttcagtctatgtaacgtgtcgctgaaggccacttcattggtggagccaatcacgtcgcttgccagcggcagaccgttgatcgcgcctttatcgtcatgcagaggacggggatcgatggcctccgctttgccgttttgtacacgaatcgtcatcagcagcggcgcgaaatctggcgtaacgaaaattttagtttcgtttttcccctctttcggtgaatccgcgttcggaccgcgatcggtaatggttgcgaatgtcagggcatcgccctgtttaccggtgaacagcaggccagaacctatcccaaccggaaggccgttcgggaatgcactggcaaatgcgccggcgtagttcacgtgcgtgccttctggaaaactgacgacatagcgctcagccgtaggttgtgccgccagggcagagaaagagagcgtacaaccgattagcacgggaataatttttcttttcatattgttagcatccataaagtgaagatcacactacaccataaagaagaaacgagtcaggaaaatgacatcgaatggcaacatgcgcgggcctgaggccaaagaaatgtaaaacactgttgttatttgtaacaacggaaacatttacggaaattatttgtctttcttcgtgatcaaaaatgctgtgtcttgttggattggagtgatgagggctgcgtttaggaaacgccctatattgtacggttgcattatcgcggtaggggtaatgcacgtgtcagtatgatgagctgaccacactcacgtgggtggactggtataacaatcgacgattgctggaaaggcagggccatatcccaccggcagaagcagaaaaagcttattatgcttccatcggaaacgatgatctggcagcctgagttcacagataaaacactctccaggaaacccggggcggttcacttagccgcgtgtccattattgctggataagatcacactttaaaatgccctatatagggttaaccagtaattatctgtatgatagctttgagttcgggaggaggtaatgactccaacttactgatagtgttttatgttcagataatgcccgatgaccttgtcatgcagctccaccgattttgagaacgacagtaacttccgtcccagccttgccagatgttgtctcagattcagattatgtcgctcaatgcgctgagtgtaacgcttgctgataacgtgcagctttctcttcaggcgtgattcatacagcggccagccatccgtcatctataccacgacctcaaaggccgacagcaggctcagaagacgctccagtgtggccagagtgcgttcaccgaagacgtgcgccacaaccgtcctccgtatcctgtcatacgcgtaaaacagccagcgctgacgtgatttagcaccgacgtagccccactgttcgtccatttcagcgcagacaatcacatcactgcccggttgtatgcgcgaggttaccgactacggcctgagttttttaagtgacgtaaaaccgtgttgaggccaacgcccataatgcgtgcactggcgcgacatccgacgccattcatggccatatcaatgattttctggtgcgtaccgggctgagaggcggtgtaagtgaactgtagttgccatgttttacggcaatgagagcagagatagcgctgatgtccggcagtgcttttgccgttacgcaccacgccttcagtagcggagcaggaaggacatctgatggaaatggaagccacgcaagcaccttaaaatcaccatcatacactaaatcagtaagttggcagcattaccgaaatccccatcctttagggcagtgaggatgtcaataatagcagaccacatcatgagtcattctgaccgacacatgccagaagcagaggctccatcccattttatacctaccttataacacttagaaaaacaacatgttaaaaatgtctattggaaacaattttatttccaattgtaatgataaccattctcatattaatatgactacgtgataattaacttttgatgcactccgcatgtctgaccgcgccactaccacagcttccttaacgttcgagtcgctttatggcacacatcacggctggttgaaaagctggctgacgcgcaaactccagtctgcttttgatgcagatgacattgcccaggacacttttttgcgggtaatggtcagcgaaacgctctcgacgatccgcgatcctcgctccttcctctgcactatcgccaaacgcgtgatggtggacctgtttcgccgaaacgcgctggaaaaagcgtatctggagatgctggcgcttatgccggaggggggagcgccttcacctgaggaacgcgaaagccaactcgagaccctacaactcctcgacagcatgctggacgggctaaacggcaaaacacgtgaagcgtttctgctttcgcaactggatggtctgacatacagcgagattgcgcacaaactcggtgtttccatcagctccgtgaaaaaatacgtggcgaaagccgtcgagcactgcctgctgttccgtctggagtatgggttatgaatcctttgttaaccgattcccgccgtcaggcgctgcgttcagcttcccactggtatgccgtgctaagcggcgagcgcgtcagcccacaacaggaagcgcgctggcaacagtggtatgaacaggatcaggataaccagtgggcctggcagcaggttgaaaacctgcgcaaccagcttggcggtgtgcctggcgacgttgccagccgggcgttgcacgatacccgcctcacccgccgtcacgtgatgaaaggattactgctgttgctcggcgctggcggaggctggcagctctggcagtcggaaaccggcgaaggtctgcgggcagattaccgcaccgccaaaggcacagtcagccgtcagcaactggaagatggctccctgctcacgctgaatacccaaagcgcggcggatgtgcgttttgatgcgcatcagcgcaccgtccggctctggtacggtgaaatcgccattactaccgcgaaagatgccctgcaacgccccttccgtgtcctgacccgtcagggccagctcactgctttagggacagaatttaccgtccgccagcaggataatttcacgcagcttgacgttcagcagcacgctgtggaagtgcttctcgccagtgcccccgcgcaaaaacgcatcgtgaacgctggtgaaagcctgcagttcagcgcctctgagtttggcgcagtgaaaccgctggatgacgagagtacaagctggacgaaggacatcctgagcttcagcgataaaccactgggtgaggtgatagccacgctaacccgttaccgcaacggcgtgctgcgctgcgatcccgccgttgccgggctgcgcctgagcgggacgttcccgctgaaaaataccgatgcgatcctgaacgttatcgcgcaaacgcttcccgttaaaattcagtctattacgcggtactggataaacatttcaccactgtaaggaaaataattcttatttcgattgtcctttttacccttctcgttcgactcatagctgaacacaacaaaaatgatgatggggaaggtatgacgccgttacgcgtttttcgtaaaacaacacctttggttaacgccattcgcctgagcctgctgccgctggccggtctctcgttttccgcttttgctgcacaggttaatatcgcaccgggatcgctcgataaagcgctcaatcagtatgccgcacacagcggatttaccctctcggttgacgccagcctgacgcgcggcaagcagagcaacggcctgcacggcgattacgacgtcgagagcggcctgcaacaactgctggacggcagcggactgcaggtaaaaccgctgggaaataatagctggacgctggagcccgcgcccgcaccaaaagaagatgccctgaccgtggtcggcgactggctgggtgatgcgcgtgaaaacgacgtatttgaacatgctggcgcgcgtgacgtgatccgccgtgaggatttcgccaaaaccggcgcaaccaccatgcgtgaggtacttaaccgcatccctggcgtcagcgcgccggaaaacaacggcaccggcagccacgacctggcgatgaactttggcatccggggcctgaacccgcgcctcaccagccgctcgaccgtcctgatggacggcatccccgtccccttcgccccttacggtcagccgcagctttcactggctcccgtttcgctcggcaacatggatgccattgacgtggtacgcggtggtggtgcggtgcgttacggaccgcagagcgtgggcggcgtggtgaactttgttacccgtgccattccgcaggactttggtatcgaggcgggcgtggaaggtcagctcagcccaacctcttcacaaaacaacccgaaagagacgcacaacctgatggtgggcggcacagcggacaacggttttggcaccgcgctgctctactccggcacgcgcggcagtgactggcgcgagcacagcgccacccgcatcgacgacctgatgctgaaaagcaaatatgcgccggatgaggtgcacaccttcaacagcctgctgcaatattacgacggtgaagccgacatgcccggtggcctgtctcgcgcggattacgacgccgatcgctggcaatccacccgcccgtatgaccgcttctggggtcgtcgcaagctggcgagcctgggctaccagttccagccagacagccagcataaattcaacattcaggggttctacacccaaaccctgcgcagcggctacctggagcaaggcaaacgcatcaccctctcgccgcgtaactactgggtgcgcggtattgagccacgctacagccagatctttatgatcggcccttccgcgcacgaagtgggcgtgggctatcgctatgtgaatgaatcaacgcatgaaatgcgttactacaccgccaccagcagcgggcagttgccgtccggctcaagcccttacgaccgcgatacgcgttccggcaccgaggcgcacgcctggtatctggatgacaaaatcgacatcggcaactggaccatcacgccgggtatgcgtttcgaacatatcgagtcataccagaacaacgccatcacaggcacgcacgaagaagtgagctataacgcaccgcttccggcgttgaacgtgctctatcacctgactgacagctggaatctttatgcaaacactgaaggctcgttcggcaccgtacagtacagccagattggcaaggctgtgcaaagcggcaatgtggaaccggaaaaagcgcgaacctgggaactcggtacccgctacgacgacggcgcgctgacggcggaaatggggctgttcctgattaactttaacaatcagtacgactccaaccagaccaacgacaccgtcactgcacgtggcaaaacgcgccataccgggctggaaacgcaggcacgttacgatctgggtacgctaacgccaacgcttgataacgtttccatctacgccagctatgcgtatgtgaacgcggaaatccgcgagaaaggcgacacctacggcaatctggtaccattctccccgaaacataaaggcacgctgggcgtggactacaagccaggaaactggacgttcaatctgaacagcgatttccagtccagccagtttgcggataacgccaatacggtgaaagagagcgccgacggcagtaccggccgcattcccggcttcatgctctggggcgcacgcgtggcgtatgactttggcccgcagatggcagatctgaacctggcattcggtgtgaaaaacatcttcgaccaggactacttcatccgctcttatgacgacaacaacaaaggcatctatgcaggccagccgcgcacgctgtatatgcaggggtcgttgaagttctgatgtgttaacgcccggcttgccgggcttttagctggaatgtgattatgttggcatttatccgttttatttttgcaggcctgctgctggtgatcagccacgcctttgccgccacggttcaggacgaacacggcacgtttacactcgaaaaaacgccacaacggattgtggtgctggaactctcgttcgccgatgcgctggccgccgtggacgtcagcccgatcggtattgccgacgataacgatgcaaaacgcatcctgcccgaagtgcgtgcgcacctgaaaccgtggcagtccgtcggaacgcgcgcgcagccgagcctggaagccattgccgctctgaaaccagacctgatcattgccgacagcagtcgccatgcgggggtttacatcgccttgcagcaaatcgcgccggtactgctgcttaagtcccgcaacgaaacctacgctgaaaatttgcaatctgcggctatcatcggcgaaatggtgggtaaaaagcgagagatgcaggcacgcctggaacaacataaagagaggatggcgcagtgggccagccagcttcccaaagggacacgcgtggcctttggcacatcacgcgaacagcaattcaacctgcatactcaggagacctggaccggcagcgtgctggcctctctggggctgaacgttcccgctgcgatggcgggtgcgtccatgccgtccatcggcctggagcaactgctggcggtcaatcctgcctggctgctggttgcccactatcgcgaagagagcattgttaaacgctggcaacaagatccgctctggcagatgttaaccgccgcgcagaagcagcaggttgcttcggtcgacagtaacacctgggcgcggatgcgcggtatttttgctgcagagcgtattgccgctgacacggtaaaaatcttccaccatcagccgcttaccgttgtgaaatgaccgcgataaaacacccggtgctgctgtgggggcttcccgttgcagcacttattattattttctggctgagtctgttttgctactcggccattcctgtttccggagcagatgcaacccgcgccctgctgcctggacacacgccaacgctaccagaagcgctggtgcaaaaccttcgtttgccacgaagcctggtcgccgttctgatcggcgcaagcctggcgctcgcgggcacgctgctgcaaaccctgacccacaacccaatggcctctccttcactgctcggcattaacagcggcgcggcgctggctatggcgcttaccagcgcgctgagtccgacgccgattgcaggctattctctgtcgttcatcgcggcatgcgggggcggcgtgagctggctgctggtcatgaccgcaggaggcggatttcgtcatacccatgacagaaacaaactgatcctcgcgggtatcgcgctgtcggccttttgtatgggccttacccgcatcaccctgctgctggccgaagatcatgcttacggcatcttttactggctggcaggcggagtgtcccacgcccgctggcaggatgtctggcagctcttgccggtggtggtcactgcagtccctgtcgtgttgctgctggcgaatcaactgaacctgctcaacctcagcgacagcaccgcccatacgctgggagtgaacctgacgaggctacgtttggtcatcaatatgttagtgctgcttctggttggtgcgtgcgtcagcgtggcaggtccggtggcgtttatcggtctgctggtgccacatctggcgcgcttctgggcaggcttcgatcagcgcaacgtactgccagtgagcatgctgctgggggccacgctgatgctgctggcagatgtactcgcacgcgcactggccttccccggagatctgcccgcaggcgcagtgctggcgctgattggcagcccttgctttgtctggcttgtgaggaggcgaggatgaaaattgcgctggttattttcatcacccttgccctggcgggctgtgcgctgttatcactccatatgggagtgatccccgtgccgtggcgcgcgctgctgaccgactggcaggccggacgcgagcattattatgtattgatggagtaccgactgccgcgcttgctgctggcactgtttgtcggtgcagccctcgccgtggcgggcgtgctgatacaggggattgtgcgcaaccctctggcatcaccggatattctcggtgttaaccatgccgccagcctggcctctgtgggggctctacttcttatgccgtcactgcccgtgatggtgctgccgctgctggcctttgcgggcggcatggcggggttgatattgctgaagatgctggcaaagacccaccagccgatgaagctggcgctcaccggcgtggcgctttctgcatgctgggccagcctgacggattatctgatgctctcgcgcccgcaggatgtgaacaacgccctgctgtggctgaccggcagcttatggggccgtgactggagctttgtgaagattgccatcccgctgatgattttatttctgccgctgagcctgagtttttgccgcgatctcgacctccttgcactcggcgatgcgcgcgccaccacgctcggtgtgtcggtgccccatacccgattctgggctttgttactagctgtcgccatgacatctaccggcgtggccgcctgcggcccgattagctttattggtctcgtggtgccgcatatgatgcgtagcatcaccggtggacgtcaccgcagactgctgcctgtttcggccctgacaggtgcgttgctgttggtggttgccgatctgctggcgagaattattcatcccccactggagctcccggttggcgtgctgaccgccattatcggtgcgccgtggtttgtctggttgcttgtgagaatgcgataaatgactttacgaactgaaaatctgacggtcagttacgggacagacaaggtacttaacgacgtttcactctcactgccaacggggaagatcaccgccctgatcggtcctaacggttgcgggaaatcgacgctgttaaactgtttttcgcggcttttaatgccgcagtctggcaccgtatttctcggcgataatcccataaatatgctctcatcgcgccagttggcccgcaggctttcgctgctgcctcagcaccatttaacgccagaggggatcacagtccaggagctggtttcgtatggtcgtaatccctggctgtcactctgggggcgtctctccgctgaagacaatgcacgagttaatgtcgccatgaaccagacccggatcaatcatcttgccgttcgtcggttaaccgagctttccggcggtcagcgccagcgcgcatttctggcaatggtcctggcccagaatacgcccgttgtattacttgatgagccaaccacctatcttgatatcaatcaccaggtggacctgatgcggttgatgggcgaactccggactcaggggaaaacggtggtcgctgtgctgcacgaccttaatcaggctagccggtactgcgatcaactggtggtaatggcaaacggacatgttatggcgcaaggcacaccagaagaggtgatgaccccaggattgctgagaacagtattcagcgtggaagcggaaatacaccccgagccggtatctggcaggccgatgtgcctaatgaggtagattgcacaggccgtaagaaccaaaccacgactgaatgaaactggactggcgccagcaagcctgttcagactggggctgaacttttccggactctgaaagattaccaatactcatcgtccatccgcttgctttaggctgacaggttcataatcaacgcaaaccagagctgtacaggcttgggcgcggctttcaaaccagtcgtgatcacggcaatcaattttgaactctgcttaacggacatttctgtataacccttacggcaacgaaaaacgcgaagttaaaattttagaaacccaaaaacgtgacatgactaagtttagatttcagggggggagatcaaaaaatttcgctctgtgccagagcggacattcacggagctggttcattaccaatgaggttgggcttttgaggataaatcaatgatcagacgccaacgtaaatcaaaagcaaccctggaacggaattgctaatccagtttctgaccatcgatttttctaaaaagtgtgcgtttgctactacttaggtaggtgcagctttcttaatcaccggcagccacgttatacaggccagttgatggatcgattgttatcaatgatatctttatgagtcggtgtctcacccagcttaccgaagctggcataaagtgaaggcagacgggcccgtccttctccctttttcgccagagggaaagcgcgaagcatggtggcagcctcccagtcacaacaataggatggtgtgcacggctgctgacgccatgattcagcgatagagccggaaaatacggggtcaaagccggtatcattaaccagagtcatcgtgacctgtactgcggctggatgatctcctgctactgcaactgctaggcgaccgcggctcccttcaggtagtctgttgtggtcaactaaaactggcctccgcgttagagtttttccagtatcggttttctgattcgtttggtggtaacccaccattatattcgtgcggtcttagtgcgctgtaatatccaacgatatagtccgttattgcgtgagctgcatcgctgaagcttacatagcccgtcgctggcacccattcgttcttcagactcctgaagaagcgctccattgggctgttatcccagcagtttccacgccgactcatactctgcctgatccggtatcgccacagtaactgccggaactgcctgctcgtataatgactgccttgatcgcctggaacatcaccccgacgggcttaccacgggtttcccatgccatttccagtgctttcatggtaagcctgctgtccggcgagaacgacatggcccagcccactggttttcttgcgaacaggtcgagaacaacggcgaggtacgcccagcgcttacccgtccagatataggtcacatcaccgcaccacacctgatttggttccgttacggcgaactgccgctcaagataattagggatagcaacatgctcatgaccaccacgcttataccggtaagtcggctgctgacaactgaccagccccagctctttcatgagtctgccagcaagccagcgccccatctggtagcctctccgggttgccattgtggcgatgcttcttgctccggcagagccgtggctgatgccatgcagttcaagtacctggctgcgtaatacagcccgtctgccgtctggtttttcaggacggtttttccagtatctgtagctgctgcgatgaaccccgaacacatggcagagtgtgaccacaggataatgcgctctgagtttcctgattatcgagaactgttcagggagacagacataaaaaaagcaactgtagattcaattggtcaacgcaacagttatgtgaaaacatggggttgcggaggttttttgaatgagacgaacatttacagcagaggaaaaagcctctgtttttgaactatggaagaacggaacaggcttcagtgaaatagcgaatatcctgggttcaaaacccggaacgatcttcactatgttaagggatactggcggcataaaaccccatgagcgtaagcgggctgtagctcacctgacactgtctgagcgcgaggagatacgagctggtttgtcagccaaaatgagcattcgtgcgatagctactgcgctgaatcgcagtccttcgacgatctcacgtgaagttcagcgtaatcggggcagacgctattacaaagctgttgatgctaataaccgagccaacagaatggcgaaaaggccaaaaccgtgcttactggatcaaaatttaccattgcgaaagcttgttctggaaaagctggagatgaaatggtctccagagcaaatatcaggatggttaaggcgaacaaaaccacgtcaaaaaacgctgcgaatatcacctgagacaatttatttgtagaccgaaaatcacgttatacgatcatccttagactcaggggcaaagattctgtctcagtaaatcaggctcttaccgacaaattcctgagtttaccgtcagaactcagaaaatcactgacatgggacagaggaatggaactggccagacatctagaatttactgtcagcaccggcgttaaagtttacttctgcgatcctcagagtccttggcagcggggaacaaatgagaacacaaatgggctaattcggcagtactttcctaaaaagacatgtcttgcccaatatactcaacatgaactagatctggttgctgctcagctaaacaacagaccgagaaagacactgtgaagtggtcaacaaaaactggccaccgagttagagttttttccagtatcgattttccgattcgtttggtggtaacccaccattatattcgtgcggtcttagtgcgctgtaatatccaacgatatagtccgttattgcgtgagctgcatcgctgaagcttacatagcccgtcgccggcacccattcgttcttcagactcctgaagaagcgctccattgggctgttatcccagcagtttccacgccgactcatactctgcctgatccggtatctccacagtaactgccggaactgcctgctcgtataatgactgccttgatcgctgtggaacatcaccccgacgggcttaccacgggtttcccatgccatttccagtgctttcatggtaagcctgctgtccggcgagaacgacatggcccagcccactggttttcttgcgaacaggtcgagaacaacggcgaggtacgcccagcgcttacccgtccagatataggtcacatcaccgcaccacacctgatttggctcggtcacggcgaactgccgttcaaggtagttagggatagcaacatgctcatgaccaccacgcttataccggtaagtcggctgctgacaactgaccagccccagctctttcatgagtctgccagcaagccagcgccccatctggtagcctctctgggttgccattgtggcgatgcttcttgctccggcagagccgtggctgatgccatgcagttcaagtacctggctgcgtaatacagcccgtctgccgtctggcttttcaggacggtttttccagtatttgtagctgctgcgatggaccccgaacacatggcagagagtggccacaggataacgcgccctgagtttcccgattatcgagaactgttcagggagtctgacatcaagagcgcggtagccttttttaatatttcattttccatttcaatacgttgtagctttttcctgagctcacggatttcaatttgttccggggtaataggggaggcttttggtgtttttccctgccgctcatcacgtaattgtttcacccatcgcgtcattgtggaaaggccgacatccatagcgctggctgcatctgccacggtgtaattctggtcaacgaccagttgagcggattcgcgtttaaactctgcgctgaaatttctttttttcattatggcacctgtgttgttctgaggtgagcatatcacctctgttcaggtggccaaattcagtaaaccacttcactgaagttcaaaacaccgaaagagataattgaaaggggtgttgcattgacagattgaatctacaacaactaaattcccgatactttggactattactcctgaacaactgtaagcgtacagcctgaaccgtctggtcagaatctgacgaattagacaaagtggtgtccaccaaataagtagtgggaaccaaagtgtcagatatgcagaaaaatgtgactcccggcaggcgaaaaggctgccctaattatcctcccgaatttaaacagcagctcgttgggggatgcggacgatttcctggactctcaggagataaaacatgtttactgaagaagaaaaaatccgcgccattgagctttatttcaaatatggtaagaagctggctcccgtcgtacgcgaactgggctacccttcgaaaagaaatctgcggcgttggatccgctcatgggaagcaggtggtggcgcaaaagaatccattcgtcataagcaccgttactccgatgagcaaaaacaggttgccgttgaacattatcttaaccacggctgctgcctggcgtttaccagcagagccctgggttatccctgcactgatgtactcgctcgctgggttaatgaactttatcccgacagacgacgtatatttaccagtaaggccaacccggttgcgccctttgaaccagaagtcaaacgtcaggctgtcatggcactctgtacacgacaagtatcagccagtgagatcgccaggcgtattggtgtcagtcgtgcggtattgtataaatagaaagatgaaattatcggcaacagtgcttaccagactatgcgtaaacataacgaaccttccctggaggcagaacgcgatgcgttgcgggaggaagtcgcccgactgaatcaggaaatacgccgccggcagatggagctggatattctgaaaaaggcggaggaaatcataaaaaaagacccgggcatcagtatcagtcacctgaacaacagagaaaaaacaaagatcgctgatgccctgaggcaaacatatcccctgacagaattacttcatgttctgggccttacccgtagcagttatttttatcaccgggctgcactgaaagccggtgataaatacgccacgatacgtacgatgctgacagatatatttaacagtaattaccagtgttatggctatcgtcgcctgcatgcgatgctcaggcatgagggggggcggctatcagaaaaggttgtacgcagacttatggtggaggaacagcttgtcgtcagccgtaaccgtcgtcgtcgctacagctcatattgcggagaaatcggaccggctccggataaccttatcgccagagattttaaggcgtagcaacctaatcagaaatggctgacagatatcacggagttccaactccctgcaggtaaagtctggctgtcaccggtggtggactgcttcgatggaaaagttattagctggtctctcagtacacgccccgatgctgagctggtcaacactatgctggatagcgctgtcgaaacgttaaatgctggcgaacgaccggtgatacacagtgacagaggtgggcattatcgctggccaggctggctggaaagagtgaatgcagcaggtcttattcgctcaatgtcccgtaaaggatgttcacctgataatgccgcatgcgaaggttttttcggcagactgaaaacggaaatgtattatgggcgtaaatggtcgggcatcacgccagaaaagttcatgcagcatgtagatgcttacatcagatggtataacgagcggcgtataaaattatcgctgggtgcagtcagccctgaaatgtaccgccaacaatgtgggctggcataataaagcagtctaggaaatcgtccgcatccccaattcaggggcggttttttctttacggtttttcgccataaagactattactatcagactgacaagactacccgcgaaagccgggagttccgcgccaagattaacagccaccagatactggggaattaatgtactgacaccacacatcagggtaattagtccaacgcctcgtatagtcttcataccaccaccgataatcgcgacgatgacgaaaggaagcagaatgttgaacagtgccagttgaagaataattgtcccgctgagtgtggttacaggtaaattaacttgttcagcaagtacagagacaggtatacctactgccccaaacgctgtagggactgtattagcaaccagtgatgcaatcgctgcttttagtgggttaaagcccagagcaatcagtataccaatggggattgctaccgctgtaccgtatccggctgccgcctcaagaaatccaccaaaacaccatgagataagaagtacctggatacgtttgtcatcactaacactcgctcaatcatttggtctgctatctcaacagattgctttcaacattattgtcagaatctggagcagattgaagatcgcatacttcaactcgatcaggaaatatctcgcctgttacctgagtgatctctgtgcaatctggtctgccagttgcaggctcttaaaggtgttggtcaactaatcgcaataaccctggttgctgaactgggtgatttttcgcgattttccaatcctgaacagctcatggcttttctgggactggtgccaggtgaatattccagcggaaacagcattcgccccagaggaataacaaaagttggaaacagcgaactgagacatctgctttacggatatcaaataaattcagattatttaacagtaaaaccccacttatgtgatgaatctcataaaaaagcaaagtgaagtaataatatccaatttatccctcattccttaagtaagcgtacactggccgcgtacaccatggcataatgatatgttgttttactgatatttccggctggtaaaatccccgacggcccggctgaagctggtgcaggaaagcgggttaattgtcactacgcgggataacctgtctcccggttcaaagctctgctgaacgatagcgatcttttcctgtgtagtacgccgtctgcgtttctccggccctaagacatcaatcatctgttctccaatgactagtctaaaaactagtattaagactatcacttatttaagtgatattggttgtctggagattcagggggccagtctaaccctgcgaactacggcccacagccagagctttggacatttcatataagtgccgtgtgcgttgttcgcggtaacgggctacccgcgcctgataacgcacgccagcagtaaggttcccgatcaccagcccgacggttaacatcaccgcgaaggtcagcagatattgcacatcagagacggcgagcgtgccgcgtggggcgataaaaaagagatcgaaactcaccacattaatgacggtggcaaccaccgaaggccagcgtccgtaaaatagtgccaccaccacgacgccaagcagatacagcatcaccaggttggcggcatcaaacgccatcagccactgcatggcaattaaggtgataacggcgcataacgcggcggcaaccacgcatccctgaatctgtacccgccacttgtctttaaaagagcggctatccggcgcgttgttaatcgtgcgggcgggtggttcatcaagcgcgaccagcacctgatcgagatcgggggcgatgcgtgccagccggtcagcaaatgtttcccgacgccaccagcggcgcgaagccgggcgaccgagaataatcttgccgagattatgttcacgggcataacgcactaccgctttctcttccgctggatcagaaagtgttgccgtctccgcgcccagctcctgcgccagacgtaaggcgctgagaattgcccgacgttttttctccggtaagcgatgcagggcaggggtttcaacatacaccgcgtgccagacactgcccaggcgcgaggccaaccgcgccgccgtgcggaccagtttctcactgccggtgttatgcccgatgcataaaaggatcgcgtcgcgtgtgtgccagactttctcttcgccaggatgcccccgccaggcgcgcatttgctcatctacgcgatcggcagtacggcgcagtgccagttcgcgcagggcgatcagattacctttgcggaaaaaatgttcaatggcgcgctccgcctgcccggcaatatagactttgccttctttcagtcgctggcgcagatcgtccgggggcaagtccaccagtactacgtcgtcggcggcatcaaaaaaaggatcgggcacggtctcccgtacctgaattccggtgacgccgctgaccacatcattcagactttccagatgctgaacgttgacggtagtgaaaacatcaatgccagcttccagcagctcttcgatgtcctgccagcgtttaggatgacgtgaacctggcgcattactgtgcgccagttcgtccattaagatcagtgccggacggcgggcgagggcggcatcgagatcaaactcgctgatgtgccgcccacggtacgcctggcgttttaacggcagaacagccagacctttcagcatggcggcggtatctttccgaccgtgggtttctaccacgccaaccacaatatccagcccttgcgcccgcagtcgctgggcttccgccagcatcgcccaggtcttcccgacgcctgcgcaggcaccgaagaatactttcagcttcccccgatgcggcgcggcagcttgttccagcagacgatcggggtcgggacgtaagggttcgttattcatcaagcttatccagtgccagattgagttcgacaatgttgacgaccggctggccgatatatttcaccagcggttgttggctgtattttgcgatcagttgcgtgagctgttcaacgctgagattacgcgctttcgccacgcgtgggatctgccaggccgccgcttgcggggtgatgttattgtccagcccgcttgctgacgccgtcaccagttcaaccggaacgttcgtgctggcatccgggttagcagcccgtaatgcggcaacgcgtgcggctatctgtttatccagctccgggttactgactgccagattgctcccgccagaagcctgtggattatagggcatttctgctgttgccgacgggcgaccatgaaaatagccgttgccggtaaaattttgcccgattaatgccgaaccgcgcaccgtatcaccttcacgaatcaatgaaccgttggcctgccagggaaaccaccattgccccagtgcggtggtcagcagcgggtaaacgccgccagtaatcaataacagaaagagaaatgtcgataatgccggacgtaatccacgcatggtaaacctcacaccagaccgcaaacggttagcagtaaatcaatgactttgataccaataaacggcaccagcagcccacccagaccgtaaatccataagttacggcgcaacatggcagaagcggtaagcggtttataactcacgccttttaacgccaggggaatcaaaaagacgataatcaaggcgttgaaaatgaccgcactgagaatggcggagtcgggcgaatgcaggcgcatgatgttcagcgcatttaactgcggatacgttgccgcgaacgccgctggaataatggcgaagtatttcgccacatcgttggcaatgctgaaggtggtcaacgagccacgggtcatcagcatctgtttgccaatgtgcactacctcgatcaacttggtcgggttggagtcgagatccaccatattgcccgcttctttcgccgcctgggtgccggagttcatcgccaccgcaacatcggcctgtgccagcgccggagcatcgttggtgccatcgccggtcatcgccactaaacggccttccgcctgatactgacgaatcagtgccagcttggcctccggtgttgcttcggcgagaaaatcatcgacacccgcttccgcagctatcgcggcggcagtcaggcggttatcgccggtaatcatcaccgttttaatgcccattttacgcagctgggcgaagcgctctttaataccgcctttgacgatatctttcagcgcaataacgcccagcacacgagaaccttccaccaccaccagcggcgtggctccctgacgcgcaacctgatcgactttttgatcaacatcggcagggaagtgaccgccgttagcctcaacatggcggcgaatggcatcgacagaacctttacggatcatgcggttgtcgatgttgatcccgctcatccggctttgtgcagtaaacggtacaaaggtggcatggagcgactgcacatcgcgctcgcgcaggttaaaacgctgcttggcgaggatcacaatactgcggccttccggcgtttcatcagccagcgaagccagttgtgcggcgtcggccagcgctttttcctccacgccttgtgcggggataaactctgacgcctgacggttaccgagggtgatggtgccggttttatccagcagcagaacgtcaacatcacccgctgcttcaactgctcgcccgctggtggcaataacattcgcgcccagcatccgactcatcccggcgacgccaatcgctgacaacaggccgccaatagtggttgggatcagacagaccagcagtgccaccagtaccgttacgctgactgcattaccgccccacgcggaaaacggccacagcgtggcggttgccagtaaaaagacgatagtcagggcaatcaggagaatggtcagggcaatctcgttcggcgttttacgtcgctgcgcaccttccaccatcgcgatcatccgatccagaaatgtctcgccggggttaacgctgcactcaatcaccagccagtcagaaagaatacgcgtgccgccagtgacggaggcaaaatcaccgccggattcacggatcaccggtgctgattccccggtgatggcgctttcatcgaccgatgcgccgccttcaatgacttcaccatcgcaggggataatatcgccagcttctaccagcacgatgtcacctttacgcagttgatcagcaggaactttgtccgccgcagcgccatatttcggttcgcgcagtttgcgagcaaaagcggtttttttcacccctttcagactgttggcctgcgctttactgcggccttctgccaacgcctcggcgaaattagcgaacagtacggtgacccacagccagccgctaattgccgcgctaaacagcgcattgccaggcatcacaccgcttgccatcgcgatgctaatacaggtggtcagcagacttccgatccagacgataaacatcaccggattgcgccattgcgcctgcgggtttaattttttcaccgcttctttcagcgcctgaacgacaagtgttggttcgaatagcgccagttgtttacgactcatattcagtgctcactcaatatcatcaggagagatattccgccaccggaccaagcgccagggcagggataaaggtcagtgcgccaaccagcaacacggtgccgattaacaggccaacaaacagcgggccgtgcgttggcaatgtgccggagctggcgggttggctctttttactcaccagcgaaccggcaattgccatcaccgggataatcaccccgaagcgcccgacaaacatgcacaacgccagtaaacagttccagaatggagagttggcgcttaatccggcaaaggcgctgccgttgttgttagcggcggatgacacggcgtacagcacttcgctaaaaccatgcgggccagggttgagcatggcgctacgtccggcgtcggtcatcattgccagcgccgcgcccatcagcaccagcgtcggggtgaccagaatcgccagtgcagtcagtttcatctcgcgtacgtcgatttttttacccagatattccggtgtacgaccaatcatcagcccggcaataaacaccgccagcaggacaaacagcatcatgccgtaaaggccggaaccgacgccgccgaataccacttcaccaatttgcatcaaccacatcggcaccatgccaccaagagcggtaaacgaatcatgcatcgcaatcaccgcgccgcaggaagccgccgtagtcacgaccgcaaacaggctactgaccagcacgccgaaacggctctctttaccttccatattgatgctgctgtccgcgccgagcgccagcagatgcggattaccctgaacttctgcccacatcactacgcctgtgcagatgacaaaaatcaccgacatcgcccacagcaacatgcgcccctggcgacgatcgcccgccacttcaccaaaggcaaagcacagcgctgttgggatcaagaaaatcgccagcatttgcacgaagttggtcagtgcggttgggttttcaaacggatgcgacgagttggcattaaaaaagccaccgccgttagttccgagcattttgatcgcttcctgagaagctactggccccattggtaacagctgttgcgatccttcaatggtcgtcacagcctgataaggcaaaaagttttgcagcgcaccttgttgtataaaaaacagtgcgttctttaaggtaagggggtgatccaaccgcaggttcccctacggttaccttgttacgacttcaccccagtcatgaatcacaaagtggtaagcgccctcccgaaggttaagctacctacttcttttgcaacccactcccatggtgtgacgggcggtgtgtacaaggcccgggaacgtattcaccgtggcattctgatccacgattactagcgattccgacttcatggagtcgagttgcagactccaatccggactacgacgcactttatgaggtccgcttgctctcgcgaggtcgcttctctttgtatgcgccattgtagcacgtgtgtagccctggtcgtaagggccatgatgacttgacgtcatccccaccttcctccagtttatcactggcagtctcctttgagttcccggccggaccgctggcaacaaaggataagggttgcgctcgttgcgggacttaacccaacatttcacaacacgagctgacgacagccatgcagcaccggtctgaccatggctgagaaattccgtgacgaaggtcgtgacgtattgctgttcgtcgataacatctatcgttacaccctggccggtaccgaagtatccgcactgctgggccgtatgccttcagcggtaggttatcagccgaccctggcggaagagatgggcgttctgcaggaacgtatcacctccaccaaaaccggttctatcacctccgtacaggcagtatacgtacctgcggatgacttgactgacccgtctccggcaaccacctttgcgcaccttgacgcaaccgtggtactgagccgtcagatcgcgtctctgggtatctacccggccgttgacccgctggactccaccagccgtcagctggacccgctggtggttggtcaggaacactacgacactgcgcgtggcgttcagtccatcctgcaacgttatcaggaactgaaagacattatcgccatcctgggtatggatgaactgtctgaagaagacaaactggtggtagcgcgtgctcgtaagatccagcgcttcctgtcccagccgttcttcgtggcagaagtattcaccggttctccgggtaaatacgtctccctgaaagacaccatccgtggctttaaaggcatcatggaaggcgaatacgatcacctgccggagcaggcgttctacatggtcggttccatcgaagaagctgtggaaaaagccaaaaaactttaacgccttaatcggagggtgatatggcaatgacttaccacctggacgtcgtcagcgcagagcaacaaatgttctctggtctggtcgagaaaatccaggtaacgggtagcgaaggtgaactggggatctaccctggccacgcaccgctgctcaccgccattaagcctggtatgattcgcatcgtgaaacagcacggtcacgaagagtttatctatctgtctggcggcattcttgaagtgcagcctggcaacgtgaccgttctggccgacaccgcaattcgcggccaggatctcgacgaagcgcgagccatggaagcgaaacgtaaggctgaagagcacattagcagctctcacggcgacgtagattacgctcaggcgtctgcggaactggccaaagcgatcgcgcagctgcgcgttatcgagttgaccaaaaaagcgatgtaacaccggcttgaaaagcacaaaagccagtctggcaacaggctggcttttttttacgcgtattgacccgtcctgaaaagcgttcacatagatcctgatgatataaaacacccctgttttcccgtttattcattgatcgaaataagagcaaaaacatccacctgacgcttaaatgaaggtactgccttaattttctgcagacaaaaggcgtgacgatggtcgaaaatggcgctttcgtcagcggggataatccgttattgaacaatttatcctctgtccatttcacgatgaaaaaaatgtagttttttcaaggtgaagcggtttaaattcgttctcaaattacagtcaggacgcgtatgttgaataatgctatgagcgtagtgatccttgccgcaggcaaaggcacgcgcatgtattccgatcttccgaaagtgctgcatacccttgccgggaaagcgatggttcagcatgtcattgatgctgcgaatgaattaggcgcagcgcacgttcaccttgtgtatggtcacggcggcgatctgcttaagcaggcgctgaaagacgacaacctgaactgggtgcttcaggcagaacagctgggtacgggtcatgcgatgcagcaggccgcacctttctttgccgatgatgaagacattttaatgctctacggcgacgtgccgctgatctctgtcgaaacactccagcgtctgcgtgatgctaaaccgcagggtggcattggtctgctgacggtaaaactggatgatccgaccggttatggacgtatcacccgtgaaaacggcaaagttaccggcattgttgagcacaaagatgccaccgacgagcagcgtcagattcaggagatcaacaccggcattctgattgccaacggcgcagatatcaataatgctcagggcgaatactacatcaccgacattattgcgctggcgtatcaggaaggacgtgaaatcgtcgccgttcatccgcaacgtttaagcgaagtagaaggcgtgaataaccgcctgcaactctcccgactggagcgcgtttaccagtccgaacaggctgaaaaactgctgttagcaggcgttatgctgcgcgatccggcgcgttttgatctgcgcggtacgcttactcacgggcgcgatgttgaaattgatactaacgttatcatcgagggcaacgtgactctcggtcatcgcgtgaaaatcggcgccggttgcgtgattaaaaacagcgtgattggcgatgattgcgaaattagcccgtataccgtcgtggaagatgcgaatctggcagcggcctgtactattggcccgtttgcccgtctgcgtcctggtgctgagttgctggaaggtgcacacgtcggtaacttcgttgagatgaaaaaagcgcgtctgggtaaaggctcgaaagctggtcatctgacttacctgggcgatgcggaaattggcgataacgttaacatcggcgcgggaaccattacctgcaactacgatggtgcgaataaatttaagactattatcggcgacgatgtgtttgtcggttccgacactcaactggtggccccggtaacagtaggcaaaggcgcgaccattgctgcgggtacaaccgtgacgcgtaatgtcggcgaaaatgccctggctatcagccgtgtgccgcagactcaaaaagaaggctggcgtcgtccgataaagaaaaagtaattctggccgggtaatccggtcatatgggatgaggagataacataatctcccgcccacaagcagtaactataaaaataaccccactctctacaaggctcggggcgcccgaaaaacgggcatacaggttgaccgacaacgatataaatcggaatcaaaaactatgtgtggaattgttggcgcgatcgcgcaacgtgatgtagcagaaatccttcttgaaggtttacgtcgtctggaataccgcggatatgattctgccggtctggccgttgttgatgcagaaggtcatatgacccgcctgcgtcgcctcggtaaagtacagatgctggctcaggcagcggaagaacatcctctgcatggcggcaccggtattgctcacactcgctgggcgacccatggtgaaccttcagaagctaacgcgcatccgcatgtttctgaacacattgtggtggtgcataacggcatcatcgaaaaccatgaaccgctgcgtgaagcgttaaaagcacgtggctataccttcgtttctgaaaccgacaccgaagtgattgcacatttggtgaactgggagctgaaacaaggcggtactctgcgtgaggcagttctgcgtgctatcccgcaactgcgtggtgcgtacggtacagtgatcatggactcccgtcatccggataccctgctggcggcacgttctggtagtccgctggtgattggcctgggtatgggcgaaaactttatcgcttctgaccagctggcgctgttgccagtgactcgtcgttttatcttccttgaagagggcgatattgcggaaatcactcgccgttcggtaaacatcttcgataaaactggcgcggaagtaaaacgtcaggatatcgaatccaatctgcaatatgacgcgggcgataaaggtatttaccgccactacatgcagaaagagatctacgaacagccgaacgcgatcaaaaacacccttaccgggcgcatcagccacggtcaggttgatttaagcgagctgggaccgaacgccgatgaactgctgtcgaaggttgagcatattcagatcctcgcctgtggtactctgccccccttaaatacgccgccgccatcgagaatgcgctgcgtaaaaaattgggcgcagatgcggggtattcagggctaatttgcaagaatccgaaccacctgcactggcagatcaccgtctggcagccagagctctatacccttgactggttagccgattacctcgaccttggcgcagccaatgaccgcgaaatcctgccggactacggtttaggccgtaactgcaccctcttcgataaaacccgcaagtgggcttaccgcgctatccgccaaggctggccgcagtatgaccaatggctacaagcctgcattgaacgcgctaaagcctacaacctgcagttctccgcacctttagacgagaacgaagtcatgggaattgctaaaagtgtggctaagtggacaagtaagaaccttacagagcttggctttgaagagtatgttaaacaaacacatacttctgaaattcagcgtcaacgtggaaaaaaaagctctggtggtggaaggccgaaagttagagatggagaatggatttctttaggaataagtagatcaacgtggtacaggaaattttacaaaaatgaaaattagaatgtatctcttatcaatgttgtttttatttataccgataacaatatatttttctggtattgataacgtatggtctgttttagataaggccatgtcttcgtgttctggcgcggatggaaaatttcaatgcgtactcgactattcaaatagcagattaacattttctgtattgaggtcagtgatctgcggggctttgattttaacttgttcttatacatacatttggtatcgatgggttttgaaaaacttagactccggtgcggtgtcaagaaagttaaaggtcgtttcatgtaaaaaagaatccggtgagtatctttcttttttatcaacgtacataatgccgttggtctttactgatttaagcaaaccatcaaatatagttaattttttgtttgttttgattatcgtcggttttttgcacatcaaaacaaaaagaattcactgcaacccaacattgtcattatttaatgtttctgcctataagattacttacagtgtggtagctaatggaagggaaaaaacgcaagacggtgagttgatagttttatctaaagatttaataaaagaaaatgattttatcagagttataaatcatgatgattatttaacgttcgcgaaaaaaatcatagaggaatgatgatgagtgacgatgccttagatcttgatgctttggagcataatgaagaaaaagcacaagagcttttagaactgtataagcattttgattgtgatattaacgatgttacattgcacacttactttaactttaaaaataaaggtaaagcgggtgctaaggactcttttagctataaaattgccatccttaaaaatgacagtgagctaaaacagtccattattgataatgtgataaagaaaactatatctgatttagaaaatcgggttgtgatagtatcagatgttaatacactaagtgaccgcaccaacaccatttcatttttaaatgatgctgagcagtatgataatgagcaaatgaagtttctgactggcattgtgtttgatgctgggtttggtggtgatggcaatgaaaatatcccaattgttgattttgacagtgtggatctaatatcaaaagttgactcaatcattttcgttttgagtaagaataatgacgacaattgtataaccatatacaagaagcaatatccagttcaaaacttatcaagaaagaaaaataatttttatgggtttagcaaaaaagaactatctcgagtagatcaagatatgatttctattgatggtaaggcatctcttgtttttgctggcgatacggtatttatctacgaccaaaatgttttcgagcgtttttttggctataaagcatggataaaaaatgctgccactgattttgttaacaatatgtccactcgttttaagggatttgttgacttaagcaaatttattgagcgagtaaataaagatagtcatgatgcggatgctttttctcggaagctagctaaggcgtatgctcgaagcgaaacaaagcaaacgctacaaacaataacaaatgaacatcttaagagtgttctagatgaaaatggatatttagcaggtgttttaaagtataaaaaaggtgatgctacgatttgcatcgcaagccataaccagcaagatacgtttatcgctatggtatccgaaggcgtattgagatcgttgattacaggcattgattatttaagccttgggtcaaagcggaaaatatcgtcagcagcatccaatactactaccagtaccacttcggattcctcttccgctgccgtgtgagacaaaacaacctatatcagataacagccctgcttttgcggggctttttgtttgtgcgtgatgcgacctcgatgtacgatagatgctgtactaagccagtacacacagcgtcccctcttcgaggtgccgtctgtgactgtttcagggggctcgccgccccccgaaaccccttgcatccactgcgaaaattcgcactttgggtgcgaaactttctcagcggattctcatggaaaagcgcaccaaagagatcaaaatcagactcaccgaagcggagcatcagcggctacttgaacgctgtgaccgtaagcatttggccgagtggttacgagccgttggcttaggcgaatcgcgtacagctcggcgtcgtccgctacctaccgtagacccgaccttgttacgtcaggtcagcgggatcggtaataacctcaatcaaatagcccgttacttgaatcagcatggcttaccgccgcaagaacgggtgtcgttgttagcggtgctcaatagcattgaccaacatcttgccgaactgctggagcaacatcgtgatcgttaagattcatggtcgtggtgccggtggcgggagtggtcctgtcgattaccttctgggccctgatcgtcagcgcgaacaagcgacggtgttacggggtaaccctgagcacgtcaaagagctgattgatggctgcgaatttgcccgaacttatacctctggcgtgctctcttttcaggagagtgatttacccgaaggcgaaaagcagcgattgatggatgaatgggagcagacattgatgaccggtctagataaagaccagtatgcctgcctctgggttcaacatcaggacaaagggcgtcttgaattgaattttgttatcccgaacatcgaattgcagagcggaaaacggctacaaccttactttgatcgggctgaccggcctcgtgttaacgcatggcaaaccctcaccaatgaccggcttgggttacgcgacccgaatgaccctgctaatcgccgagcattaaccccctctaatgaccttcctcgcaacaaacagcaggcagcggaagccattaccaaagggctaatcagcttgattgagcagggagaaattacggatcgtaaaggggtgatttcccaccttaccgatgccggattgtcggtcgtacgggaaaccaaatccagtatcagtattgctgatccggcaggtggcccgaatattcgcttaaaaggagtgctgtatgagcgagattttaaatttagcgcgggagttcgagagcaaatcgaagcagcaagccaagactaccgcaacgagcgtcgcgaacgcattcgagaagcacgagaaacgtatcaccgaggccttgaaattaagctcagggaacatacagaccgctatccaagaagagaacgacagccagctaaaacagatacaccgcttagtcggaatgacatggctgtacagcctggcattaagtgggatcctgtttgcgatattgattggagtagcttggtatctcgggactatcgtggtcgaacgccagaacgaaatcagcgagcagagccagatcctgcaggacttaaagagccagaccggagccggcgtatcgataattcacgattccaagaacaagagcgtgtattacctgatccttccgcagggggcgaagaagatcgacgagtacaagaacgctcaacatcgtcaggtcatcaagtacagcgccaaataacctcatcagacgccacagaatcgattctgggcggttttatctatcagggtgaagagattcatgaccgaaatggagcagcagcttctgagcgcattagagagcttacagaggcactacgaacaacagcagcaagcgtggcaggacagctacgccaacttacagcgcatgttcgaggttacctcgcaggagttggcgaaaaacgacagggtttgtcaggccttgagcatgcaagtcaccggcttggcgcagcaagtcgagagcttaaacagaacagtgcgccgcttgagcaattagccaagcggcacgaacagcggtattctcgcggtcacggcatgagtttataagcgtttatcggccgcatcgtaagcggcagaacgctcgcgcttaccgaccgccaccacgaataccgtaatggtttgatcgcgaacctgatagaccaagcgataaccggatgcacggagcttgattttgtagcagtcatgcagctctcgcaggcgatttttatcgatccgcgggtgttgtagaacctgctcgagttttttcttgaactgcagacggacatcatccccgagcttgcgccattccttcagggctcggggatcaaattcaaggttatagctcatccagtgacacctttacgcccgcctgtgggttttccagacgatcccgaacgatagccatcaaatcggcatcatcctcggtcagcaaaacctgctggaacggcaaacgtccgctttgggccacatattccagtgtttggcgcagaacctcggacggcgttacgcccagcttttccagtgcggcataagagcggcttttcagctcgtcatcgatccgaatattaatcgtggccatcatctcacctcttgatgtagtgacaagtgtatctacaagaagtagtatgagcgtaaagccgtgcgagaacaagcaggaataacggattgtcggggatgacaaaaaccgttgttgaggtgtaacttagtggcagaaaaaacaaagccccgaaatcatgctctactttggcgagcggacatgacattcagggctaggtcgaaacctagaaaggatattagcacatgcagcgtgcaaaacaacagccccgccataaggctgggagccttggataatcaggctttaacgctttttaacgaccggttaccccacaagccgtacttctccgatgatttacagtttggtgttcgcattgccggtaaagagcgtgctctcctcgcaaaatacatccagtttaatcagcctcacgccatgtactggctttgctttgacgtggacagagccggagccgcgattgattgggccgatctgggggcacctgcgcccacactcaccatcaaaaaccccgagaacggacatgctcacctgttgtatgccttgcatacggcggtacgtaccgcgccggatggtcgagctgccccccttaaatacgccgccgccatcgagaatgcgctgcgtaaaaaattgggcgcagatgcggggtattcagggctaatttgcaagaatccgaaccacctgcactggcagatcaccgtctggcagccagagctctatacccttgactggttagccgattacctcgaccttggcgcagccaatgaccgcgaaatcctgccggactacggtttaggccgtaactgcaccctcttcgataaaacccgcaagtgggcttaccgcgctatccgccaaggctggccgcagtatgaccaatggctacaagcctgcattgaacgcgctaaagcctacaacctgcagttctccgcacctttagacgagaacgaagtcatgggaattgctaaaagtgtggctaagtggacaagtaagaaccttacagagcttggctttgaagagtatgttaaacaaacacatacttctgaaattcagcgtcaacgtggaaaaaaaagctctggtggtggaaggccgaaagttagagatggagaatggatttctttaggaataagtagatcaacgtggtacaggaaattttacaaaaatgaaaattagaatgtatctcttatcaatgttgtttttatttataccgataacaatatatttttctggtattgataacgtatggtctgttttagataaggccatgtcttcgtgttctggcgcggatggaaaatttcaatgcgtactcgactattcaaatagcagattaacattttctgtattgaggtcagtgatctgcggggctttgattttaacttgttcttatacatacatttggtatcgatgggttttgaaaaacttagactccggtgcggtgtcaagaaagttaaaggtcgtttcatgtaaaaaagaatccggtgagtatctttcttttttatcaacgtacataatgccgttggtctttactgatttaagcaaaccatcaaatatagttaattttttgtttgttttgattatcgtcggttttttgcacatcaaaacaaaaagaattcactgcaacccaacattgtcattatttaatgtttctgcctataagattacttacagtgtggtagctaatggaagggaaaaaacgcaagacggtgagttgatagttttatctaaagatttaataaaagaaaatgattttatcagagttataaatcatgatgattatttaacgttcgcgaaaaaaatcatagaggaatgatgatgagtgacgatgccttagatcttgatgctttggagcataatgaagaaaaagcacaagagcttttagaactgtataagcattttgattgtgatattaacgatgttacattgcacacttactttaactttaaaaataaaggtaaagcgggtgctaaggactcttttagctataaaattgccatccttaaaaatgacagtgagctaaaacagtccattattgataatgtgataaagaaaactatatctgatttagaaaatcgggttgtgatagtatcagatgttaatacactaagtgaccgcaccaacaccatttcatttttaaatgatgctgagcagtatgataatgagcaaatgaagtttctgactggcattgtgtttgatgctgggtttggtggtgatggcaatgaaaatatcccaattgttgattttgacagtgtggatctaatatcaaaagttgactcaatcattttcgttttgagtaagaataatgacgacaattgtataaccatatacaagaagcaagttcgtctgacggcagaagaagaccaggaaatcagaaaaagggctgctgaatgcggcaagaccgtttccggttttttacgggcggcagctctcggtaagaaagttaactcactgactgatgatcgggtactgaaagaagttatgagactgggggcgttacagaaaaaactctttatcgacggcaagcgtgtcggggacagggagtatgcggaggtgctgatcgctattacggagtatcaccgtgccctgttatccaggcttatggcagattagcttcccggagagaaaactgtcgaaaactgacggtatgaacaccgtaagctcccaaagtgatcaccattcgctttcatgcatagctatgcagcgagctgaaaacgatcctgacgcatccttcctgtttttccggggtaaaacatctctttttgcggtgtctgcgtcagaatcgcgttcagcgcgtttcagtggtgcgtacaattaagggattatggtaaatatatgagctatgcgataactttaactgtgaagcgatgaacccattacaggcaaagccaattactcctgacagtggtttagccagaagcagggctaccaagaccaatgcaataagtaatatatcgttttgctatcgtgcatcgctcgcgctcagttccattgtgcttttttaagctgtcgtttttcttacggtatataccggttttttatggcgtggtttcttaacttgttcagctactgatggacccattgtatctaggtagtcaactagctttgttagatcataaatattgcgaccaccatatcggcgatcactcttcgatgttggtttcttgtccaagagattagctttttcaagatcattgatagctctctgaacagtccgtacagaaacccccatacgtatggctagactttccattgacggatgcggccactcttgcaaactccaccagtgaacgatcaggttaagtagtgtgttaaaggccactgaagttagctttttctcgttttgtataaaaaacaatacggtaggcactgctgtccagccaagagacaaaccgccagctttccatttattcttaacggagtaagtcattgattttcctaagccccaaaatatttaaagtatatattatatggtatattcatatgaatagggtgacactggcgccattattgtgcaaccaaaaaagactactctgaaaacgaggaaaagattttttcctgcctgaattagatacggagttagcgatatgaaaaccgaacaacgtcatgatcttgttaaagatattgaggtttttggcgtatccttgtctctgttgatttccagagcgaatgagaagtctgttacaatgccatctggtctaagtcgggagcagagaagagcatgggcagcggagcaggcgcgcaaaatccacaattgaatattgtctcattctctgagaccttcaacctttattacacatccagatattctgcaaaaacactcgataaaatcgatgatttcattgagcattttgaaaaatacaatctctttggcgatcctttaaaaggatatccagcttggactggcaaagtatcgccatcgtggaaagtgcctgatcattacgaaaacaaagaagctattgagaagtatgctagagctaacaaattatggcatgctcatttaggcgatccggtttttaaagatacgtttcatgggaaatacaaggtttctgactgggttattcatttccagcggctgacaccgaaccatataaagcttttagagcttggataccatgacccaatgaagctacctcaaaactttgaatgatcgagcggcaggctaaatgaaatcttgagattcattcagtctcgtcgtaatctcactattgtaaaaacgaaaaaaccaccctggcaggtggtttttcgaaggttagttaatcctggcagattctctaaccgtggtaacagtcttgtgcgagacatgtcaccaaatactgtcctttcagtgtagcctcagttaggccgccacttcaagaactctcgttacatctctcgcacatcctgcttaccagtggccgttgccagtggcgttaagtcgtgtcttaccgggttggactcaagacgatagttaccggataaggcgcagcggtcgggctgaacggggggttcgtgcacacagcccagcttggagcgaacgacctacaccgaaccgagataccaacagcgtgagctatgagaaagcgccacgcttcccgaagggagaaaggcggacaggtatccggtaagcggcagggtcggaacaggagagcgcacgagggagcttccagggggaaacgcctggtatctttatagtcctgtcgggtttcgccacctctgacttgagcgtcgatttttgtgatgctcgtcaggggggcggagcctatggaaaaacgcctcccgcgcgcccttcttctgggtctttgtcttttgctcacatgttctttccggttttatcccccgattctgtggataaccgtattaccgcctttgagtgagctgacaccgctcgccgcagtcgaacgaccgagcgtagcgagtcagtgagcgaggaagcggaagagcgccttatgtgacattttctccttacgctcctctatgccgttctgcatcctgtccggatgcgttatatcccggtaagattttccgcttcaaagcgtgtctgtatgctgttctggagttcttctgcgagttcgtgcagtttctcacacatggcggcctgttcgtcggcattgagtgcgtccagtttttcgagcagcgtcaggctctgactttttatgaatcccgccatgttgagtacggcttgctgctgcttattcatcttttcgttttctccgttctgtctgtcatctgcgttgtgtgattatatcgcgtaccacttttcgactgttttgctgccgctattctgccgcttggctttttgacgggcatttctgtcagacaacactgtcactgccaaaaaactgccgtgcctttgtcggtaattcgagcttgctgacaggacaggatgtgcaattgttataccgcgcatacatgcacgctattacaattgccctggtcagggctttgccccgacacccatgtcagatacggagccatgttttatgacaaaacgaagtggaagtaatacgcgcaggcgggctatcagtcgccctgttcgtctgacggcagaagaagaccaggaaatcagaaaaagggctgctgaatgcggcaagaccgtttccggttttttacgggcggcagctctcggtaagaaagttaactcactgactgatgatcgggtactgaaagaagttatgagactgggggcgttacagaaaaaactctttatcgacggcaagcgtgtcggggacagggagtatgcggaggtgctgatcgctattacggagtatcaccgtgccctgttatccaggcttatggcagattagcttcccggagagaaaactgtcgaaaactgacggtatgaacaccgtaagctcccaaagtgatcaccattcgctttcatgcatagctatgcagcgagctgaaaacgatcctgacgcatccttcctgtttttccggggtaaaacatctctttttgcggtgtctgcgtcagaatcgcgttcagcgcgtttcagtggtgcgtacaattaagggattatggtaaatatatgagctatgcgataactttaactgtgaagcgatgaacccattacaggcaaagccaattactcctgacagtggtttagccagaagcagggctaccaagaccaatgcaataagtaatatatcgttttgctatcgtgcatcgctcgcgctcagttccattgtgcttttttaagctgtcgtttttcttacggtatataccggttttttatggcgtggtttcttaacttgttcagctactgatggacccattgtatctaggtagtcaactagctttgttagatcataaatattgcgaccaccatatcggcgatcactcttcgatgttggtttcttgtccaagagattagctttttcaagatcattgatagctctctgaacagtccgtacagaaacccccatacgtatggctagactttccattgacggatgcggccactcttgcaaactccaccagtgaacgatcaggttaagtagtgtgttaaaggccactgaagttagctttttctcgttttgtataaaaaacaatacggtaggcactgctgtccagccaagagacaaaccgccagttgccgttcccgccggctccccgtcgtcagagaaacccagttgttgagaatcatccggcgcacccgccacccacgccacgcaatggtggcgggcatcggggtgttctgcccgcaccgattcaacaaacgcttttgccgcctcaacgccatcggtatgcgccaacagcgtaatgaagcggctctttttgatctcttcaacgaccgtgaccggtgccgcaggaattaaccagctttccatcacgccagtttcagatcccgggtcatgttttccacgttgttttcgtgaatcaccacgttgtcttcgatacgaatgccgccgaacggtttcagtgcttcaattttctgccagttgaagtgtttgctgaactgcccttcacgccacggtgccagaagcgattcgatgaagtagatacccggttcgatggttaacaccatgcccggctggagaatacgggtgcagcgcaggtacggatattttgccggtgccgcgaggtgcgtaccgctatcatcctgcataaaaccggctacgtcatgcacctgcaggcccagcggatggccgataccgtgcggcataaacggtccggtgagatcgttttcgaccatcgcttcttcactcatatcggtgatgatttgatgtttacgcagcagtttggcgatgcgctgatggaactggatatggtaatccacatagctgacgcctgctttcatggtggcgatcagcgccagttgctcatcatttacgtctttcaccagctgtgcgtagtcgttgtcgctttttgccgaccaggtacgggttagatcagccgcatagccgttatattcggccccggcatccagcaggaagctgcgcatctcttccggtgcctggtggtccagtttggtgtaatgcaacaccgcagcgtgttcgttaagcgccacaatgttgctataaggtacgtcggtatcacgatgaccggtcgcggtcagataggcaatgttgatatcgaactcgctcatgccagaacggaacgcttcttctgccgcgcgatgaccgttgaccgccattttctgcgcttcacgcatacaggccagttcgtactcggttttgaaggagcgatagtaatgcaggtagtcgatcacccctttcgggttgatattgctggcctcaatacccagttgcagcgcacgttctggcaccggaccgatataaccgatattgccgcgcgcagcaggcaacagactaccaatgccatcggcttttggcagcgcgatcacttctacatcttcagtccagaaggagttcggcagcggttcgacgttgtgccagtaatcaaccggcagataaaaccacagtttcggcttattcacgccatccaccagcagccagcagtttggcacctgagttaccggcacccacgctttgaattgcgggttcactttaaacggatagggatgatcgtcgagaaaaacgttgaacagttcgccggagtgaataagtaacgcatccagcttgaagcgcgccagcgcatcgcgagtccgttcctgtaaggtagctatatgatttttatagagcgaggccagtgattccattttttacccttctgtttttttgaccttaagtctccgcatcttagcacatcgttcatccagagcgtgatttctgccgagcgtgatcagatcggcatttccttaatattttatttgcatatttttaacacaaaatacacacttcgatgcatctggtacgaccagatcaccttgcggattcaggagactgacatgctttacaaaggcgacaccctgtaccttgactggctggaagatggcattgccgaactggtatttgatgccccaggttcagttaataaactcgacactgccaccgtcgccagcctcggcgaggccatcggcgtgctggaacagcaatcagatctaaaagggctgctgctgcgttcgaacaaagcagcctttatcgtcggtgctgatatcaccgaatttttgtccctgttcctcgttcctgaagaacagttaagtcagtggctgcactttgccaatagcgtgtttaatcgcctggaagatctcccggtgccgaccattgctgccgtcaacggctatgcgctgggcggtggctgcgaatgcgtgctggcgaccgattatcgtctggcgacgccggatctgcgcatcggtctgccggaaaccaaactgggcatcatgccgggctttggcggttctgtacgtatgccacgtatgctcggtgctgacagtgcgctggaaatcattgccgccggtaaagatgtcggcgcggatcaggcgctgaaaatcggtctggtggatggtgtagtcaaagcagaaaaactggttgaaggggcgatggcgattttacgccaggccattaacggcgacctcgactggaaagcaaaacgtcagccgaagctggaaccgctaaaactgagcaagattgaagccgccatgagcttcaccatcgctaaagggatggtcgcgcaaacggcggggaaacattatccggcccccatcaccgcagtaaaaaccattgaagctgcggcccgttttggtcgtgaagaagccttaaacctggaaaacaaaagttttgtcccgctggcgcataccaacgaagcccgcgcactggtcggcattttccttaacgatcaatatgtaaaaggtaaagcgaagaaactcaccaaagatgttgaaaccccgaaacaggccgctgtgctgggcgcaggcattatgggcggcggcatcgcctaccagtctgcgtggaaaggcgtgccggttgtcatgaaagatatcaacgacaagtcgttaaccctcggcatgaccgaagccgcgaaactgctgaacaagcagcttgagcgcggcaagatcgatggtctgaaactggctggcgtgatctccacaattcacccaacgctcgactacgccgggtttgaccgcgtggatgttgtggtagaagcggttgttgaaaacccgaaagtgaaaaaagcagtgctggcagaaaccgagcagaaagtacgcccggataccgtactggcgtctaacacttcaaccattcctatcagcgaactggccaacgcgctggaacgtccggaaaacttctgcgggatgcacttctttaacccggtccaccgaatgccgttagtagaaattattcgcggcgagaaaagctccgacgaaaccatcgcgaaagtcgtcgcctgggcgagcaagatgggcaaaacgccgattgtggttaacgactgccccggcttcttcgtcaaccgtgtactgttcccctatttcgccggtttcagccagttgctgcgcgacggcgcggatttccgcaagatcgacaaagtgatggaaaaacagtttggctggccgatgggtccggcatatctgctggatgttgtgggcattgacaccgcgcatcacgcccagactgtcatggcagcaggcttcccgcagcggatgcagaaagattatcgcgatgccatcgacgcgctctccgctaacgtaaccgatttcacttcaatatagcagtctggacgcgaatccgcctgcaacataaagtcaatacggctgcgttcggcgccgtattttacttcgcttttcagcgagctatagcctgccagctctgaaattgattcattaaggatagcctctttcgtcaacctgttagcccaaagcgtattgacgcaaataattgcgccgctctggctttgagttaattcccaggtgtgtgggtatttccgtttggtgttgtctgaagtcgaataccagacggtatcgccaggcgttgcacaaccggtcatcgcacccgtattcgggcagtgtagcgttaattcgcgaccatcgggtgtgatcacatcggctaaaaaacgtttgtaacgctgaattagcgtcgcgcgctgtagagggggagaaaattccattgcgacaatccttgttattgcgttagcgcccagcgttttagcggcgtgtagcgtgtgcgtccacgggcaaacgaggaggcgtaaagggtgaactccgtcaccgtatacgaccagttaaaacctggcggcgggattgtcaccgcctcgctggcgtcgcgcaataaggtaatatgtggatgaaacggacgattgctttgaaaacaaccgctgcgggcagcctgtgagcggagcatattcgccagctggattaagccgcgaggcggctgtcgcatccctaaccacaccacacgcgaacgcagccattgaccggcgtcatcaagcgtgagtgtgaaaccaggttgacgaatccgtccggctaaaagagaaagcgccttctctttctctgcgctcacttcgcctaaaaatgccagagtcagatgcaaattatcggcggcgaccggacgtcccgcctcaggtgggaagtgtgtggcgcgccagcggataatctgttcgcggatttctgcaggtaagtcgatagcaaagaacagccgttgcggttcagacatgtgaggcactcggttatgaattaccgcgatgctacaatgtggcgcgaagaatgttaaccctctggagcgttttgtgtcgtcgttgcccgttgctgccgtcttacctgagttacttgctgccctcgatggtgcatcgcaggtgttattaagtgcgccgaccggggccgggaaatcaacctggctgccgctgcaactgctggcgcatcccggcattaacgggaaaattatcctgctggagccgcgtcgtctggcggcgcgtaacgttgcggagctgcttaacgaaaagccaggcgataccgttggctaccggatgcgtgcgcaaaactgcgtcgggccgaatacccgcctggaagtgattaccgaaggcgtgctgacgcggatgatccagcgtgacccggaactgagtggtgttggattggtgatccttgatgaatttcatgagcgcagcttgcaggcggatttggcattggcgttgttactcgatgtgcaacaaggtctgcgtgatgaccttaaactgctgattatgtcggctacgctggacaacgaccgcttgcagcaaatgctgccagaagcgcccgtcgtcatctcagaagggcgctcgtttccggttgaacgccgttatttgccgctgcccgctcatcagcgttttgacgaagccgtcgcggttgctaccgccgaaatgctgcgtcaggaaagtggatcattactgttatttttacctggcgtcggagaaattcagcgtgtgcaggaacaactgacttcacgcatcggcagtgatgtgttgctctgcccgctgtatggcgcgttgtcgctgaacgatcagcgaaaagcgatcctcccggcaccgcaagggatgcgcaaagtggtgctggcgaccaatattgctgaaacaagtttaaccatcgaaggtattcgtctggtggtggattgtgcccaggaaagggtggcgcgttttgatccgcgtacagggcttacgcggttgattactcaacgcgttagtcaggcgtcgatgacgcaacgtgccgggcgtgccgggcgtctggagccgggtatctgcctgcatttaatcgccaaagaacaagcagaacgcgctgccgcgcaaagtgaaccggagatcttacaaagcgatctttccggtttgctgatggaattactgcaatggggatgcggcgatccggcgcagatgagctggctggatcaaccgccaacggtgaatctactggccgcgaaacgcctgttacagatgctgggggcgctggatggcgaacgcctaagcgcgcaagggcaaaaaatggcagcgctgggtaacgatccgcgtttagcggcaatgctggttagcgcgaagaacgacgacgaagctgctaccgcggcaaaaattgccgccattctcgaagagccgccacggatgggcaatagtgacctgggcgtggcgttttcgcgcaatcaacccgcctggcagcaacgtagtcagcaactgttaaaacgcttaaacgtacgcggcggtgaggcagacagttcgcttatcgcgccgctacttgccagagcgtatgccgatcgcattgctcgtcgccgtgggcaagatgaacgctatcaactggcgaacggcatgggggcgatgctcgatgccgacgatgcgctaagccgccacgaatggttgatcgcaccgttattattgcagggcagcgcctcgccggatgcgcggattttactggcgctgccggtcgatattgatgagttagtacaacgctgcccgcagctggtacagcagtctgacactgtggcgtgggatgacgcgcaaggtacgctgaaagcctggcgtcggctgcaaattggtcagttgatggttaaagtgcaaccgctggcgaaaccctcggaagacgagttgcatcaggcgatgcttaacggcattctgcgttctgtgctccaggggcgatcccagatattttttgccagctctttcagtgtccagcactggcttgtctgttgcatctgttcccgcaaccacatcagcttttcctgccgggactcagtcatccatttgtcgctgtactgccacaggaagcgggtacctttggcctgacgacgactttcaacagggaggtgcggatgttcattctggcgggttttatcaaccacttcgcccagttgcttcgccacatggaagcgatcgaaggcgattttctcgaccgcattgggtaaatggatacgcgctgctcttatatagcccgcattcatgtccatcgacagtgttttgatggccaacaactgactgtcagtaagcgaacggagatagctggcaagactctctgtgccacgatcatcggttaatgccagtgcccgcccgtcgcgatcagataccacggttatatacctatgcccttttttaaaggcgacttcgtctacattcatatgacgcactgataaaggctttttaatccgcgacaggcctcgcttaaccgcgcgggtcatgatgccgtcaacggcattccagctaagtttaagttgttttctgaccgcatcaacggtgctgattttaagccatgagagcacgaacgattcgaacagcagagtgtaccgactgccggaacctgcccacggtacaggcagagtctggcagccatgctccgggcacataacgcggggaacatcggcttctactaatgtcatgaactggcaggtatcaaggtggcgccatttacgatgtcggtgatcgtgaacagaacaggatttcctgcaggtcggacaggttaactgagtattttcagcaattccgactgtaacagtaacggaacctgcattttcatcgagggtaagggatttaacctgccatggtgcagtcaggttaaggatatgggcatagagggatttttcgtccatataatttcattctgaagcttactttaaactgatattattattttttgcccactttcttaatcttccattagcgttggcgtaaggcgaagatgtgttaaatgagatcattctccccatcgtccattttgtgtaccatggtcttccatacaaaatatcatcggtacgatcattaataaggttcacaatctcattttttacagtctgaagttcagctactaacaactcataacttaactcactgtaatctgagtaaaatttttgagcaagaaggccaagctgattccatttatagccagtttccggaaaatcgacaggcagacctttagcatcagaagcgatccactttacaacaagagcattccatccaagcagatacgaaacgagatcacgaacactcatctccgttcctttggcgtgtccgtccattgatttatctgaagtaatttctggtgggattgtgttgaggtaactaattaatttactaaaatttttatcaatagctaaaagcagttcagcttttgtttgcggcacactcataagaattccctctcatgtaaaaagagacaccataaaggtactgtgtggtgtttgaaaatcactcaattatgtaccacccaccacaacaggggaagacccttttgcagggggcgctggaagatggtactcaccgctggcagatccagactaacgatgaactgaaaaccgccgctgaatatcagccgctgattattcattacaacaacggcggcgcggttcgtctgggcgatgtggcgacggtgaccgactcagtacaggatgtgcgcaacgccgggatgaccaacgccaaaccggctattttgctgatgatccgcaagctgccggaagccaacattatccagacggtagacagcatccgcgcccgtctgccggaattacaatccaccatcccggcagcaattgatctgcaaattgcccaggatcgctcccctactatccgcgcgtcgctggaagaggttgagcagacgctgattatctcggtggcgctggtgattctggtggtgtttttgttcctgcgttcgggtcgcgccaccattattcccgccgttgcggtgccggtttcgctgattggtacgtttgcggcgatgtacctgtgtggtttcagtctcaataatctttcgttaatggcgctcaccatcgccactggctttgtggtggatgacgccatcgtggtgctggaaaacattgcccgtcatctggaagcggggatgaaaccgctacaggccgcgctacaaggtactcgcgaagtcggctttacggtgctgtcgatgagtctgtcactggtggcggtgttcctgccgctgctgttgatgggcggattgccgggtcgcctgttacgcgagtttgccgtgacgctttctgtcgccattggtatttcgctgctggtttccctgacgttaacgccgatgatgtgcggctggatgctaaaagccagcaagccgcgcgagcaaaagcgactgcgtggctttggtcgcatgttggttgctctgcaacaaggctacggcaagtcgctaaaatgggtgctcaatcatacccgtctggtgggcgcggtgctgcttggcaccattgcgctgaatatctggctgtatatctcgatcccgaaaaccttcttcccggagcaggacaccggcgtactgatgggcgggatacaggctgaccagagtatttcgtttcaggcgatgcgcggtaagttgcaggacttcatgaaaattatccgtgacgatccggcggtggataatgtcaccggctttaccggcggttcacgggtgaacagtggaatgatgtttatcacccttaaaccacgcggcgagcggagcgaaacggcccaacagattatcgatcgcttgcgtaaaaaactggcgaaagaaccgggagcgaatctgttcctgatggcggtacaggatattcgcgttggcggacgtcaggctaacgccagttaccagtacacgttgttatccgacgacctggcggcactgcgcgaatgggagccaaaaatccgcaaaaaactggcgacattgccagagctggctgatgttaactccgatcaggaagataatggcgcggagatgaaccttatttacgatcgcgacactatggcgcgattgggaattgacgtgcaagccgccaacagcctgttaaataacgccttcggtcagcggcaaatctcgaccatttaccagccgatgaaccagtacaaagtggtgatggccctgacgtatcacatcaccaaacgcgccccagcgaagctcttcaagcgccacataacaacgtccggcaggggaaaatgacgcatatcgcccggcgctccaccatgagaatatctgctcaagatgtaactgcgcccgctgaacctggtcaacacggtggagtttttcttcaagatgattcagtttatggtgaacctgatcggccaggatgagtaactgctcccgtgtatctgcggaataatgcgccagcctggcagtatcactgaccagtgaactgaccctgtcgtttacccgggtaatcgcgtagtttgtggtggcaagtgacgttgtcagctccgtcagccagcgcagggacgcctcaaggccctgtgcaaccgaagcattgatggcattctgccgtgcagcgccttcgccggtcagtccctcttttaaacgccggaagaacgtgcgctctccggccgtgcggatatgctcctgtgcaacatcgattccgtttgcgaaatcaaccacaaatttttcaggaagacaggtgagtacctgacatacccggttatcagcaatttgttgaataaatggtgaagtcacagcattgtctccagctcttccctcagcgccttactgtcagtaatgagctcaggaaccctttcatttaatgcctgaagtcgcctggtaagccgttcctgtgcctgctgatcgcgtttatgatcttcagagctctgaatcagcgtgttacgcagttgttcaactttctccctgaatgcgcagaaaaaggcatcgatttcctggcggacgggctggttaatatcctgctcaatggatgcctgcagctccccgaaatatgcccgggtcagtgacataacttccttcctgacggtgttgatattgataacactgcggctcacatcctctttataggtttcccagccccagtcactggtgccaaacgctccacaaatctttccccataaaccactctgccgacggcgacgggtgacggtctccgttctttcctccataagcgcactcagatttgtttttaccgcgagccgggtctgtaactgactgactgccggaaaactgatttttacggtaaagccctcatcctccaggcgggcattgatgcgaccggcaatgttttctgtggcgtacagggccgtgccacgaaaacctgtttcaatcccgctgacgattttctccagctcaggccggaactgtgcttcagcctcacggtgcaggctggtcacggtcgattcgatttgcgtcatcagttcaagggcttccctgcgatcactgaattttatttcggggctgtcgggatcaaagtcccgcatcctgtcatgctgatttccggttccgaaaatatcgtgaaagaaagcgaatgcgtttctctcccggggctgcgctgaattttcttcctccagcatttgctgttctttgcgtttaccgcttctgaaatagtcattcagctcctcttccagtgaggtgcagacccccgtcagtaattcccgggttctggcatcgatctcctccatggccattctgacatcagcggtcacctgctcctgacagtccgcgattttccggatatccgcaagcaggctggtgatattcgcctgcagtgactgaatgctttgctgcagcccctgatggcgtaacgacagatattcactgacattttctgcattctgcatcagttttgcggcggcagaatcaaccgccagtgccgcagctctggagtgtgaactcagtatgacttccgttatcagttgatcgataagtgagcattcccacaggtctgtcgccccttcagttgccagttcgctgtctttacagacgtaatcttttttcatgcgaccgaaggcttccctgacaaaatcatcgacccaggcttagttctaccttaagggtatattgttactatcacgagttcatgatagttaagtttttagtaaaacacgacatatgacgatacatatattagcaaaattatgacaaatgaggctaccttaacaaaaattcattaatagcaaacacataaataaagactctcctaccaaaaaaacagactcttcactccttcttaactattttcatgagaaataataaacaaggaatttattacctttgaatacaaacttatatatacaatgaacttaaactcttgaatcattatccagagaatatcattaattggtgatgacctagctatgcatggcagcattcatgataatgagtatatactagccagaatgacacaaagagatatttaactaactaatatattgatagtcaatgatgacagatcgtagtaatatattaatacttagccctctgaaatatcaagtcatgtacgatgctcccgttattttaatttcgttctagctgtacttttgaatacaaccataactgattattgccaactgactgaatgaaaaatatcaataaatacaacaaacttactgccttttcgttttatttataagacgttccaactacaagaacaatataggcacatgattattccaacaatactggacaaaaactcccgtatctgaagatacaataggtgataattctttcaggattttgctcaactatggcctgatgggagagtcatgacggaactaaggcctttacaagccagaagattagtcttaatgcgatcacagttcaacttgctacgactgaaatccgtaatagcatataaactctgtttttttaacagaaatgaagatcttcttgttgcataaatgatgcttctctgcctctgaaaaagtaaatataaagtatatttaataagattaatttttatgatagtgataatttatgatggggattcatatggcatatctaaaaggatagattacatgttgaattctacaacatcttcgggaaaaagaaccggcattttagcaattggtgcccatcctgatgatatagaattaggatgtggtgcatctctttcatattattctaatgaaaaagtatatattatatctgttgtcatgacacctggttgctgtggcgcagagtatattgatcgtcacaaggaatcacaagaagcattaaatatgttaggatgcaataaactaatccctctaaattttgaagataccagattatatttgcaaataaaagagatgatatcatctctggaatacataattgagaatgaaacgccccaggatgtggaaattactcgagtttacaccatgaataatactgacaggcatcaggatcacattgctgtttatcaggcatcaatggttgcctgtcgttatattcctcaaatactaggatacgaaacaccaagtacatgtctgtcatttttacctcaagtttttgaatctgtagatgaggtccattttaataaaaaaatattagcattacaaaagcataaaagccagatccatcgaagatacatacagccagaatacataattgctcaagccaaattccgaggacaacaggttagtcattctatgtgtgaaggttttgttgtccataagatggtgttgtaacggagtaatagaaatgaaaactttgttatttatcttcatgaccatagcaatgttgctatggtttttaagtacgctaagacgtaaaccctgtcaaaagaaaggctgtattgacgccattataccagcttataacgaaggcccgtgtctggcgcagtcactggataatctgctgcgtaacccttatttttgccgggtaatttgcgttaacgacggatccacggacaataccgaagcggtcatggcggaagtcaaacgcaaatggggcgaccgctttgttgccgtcacgcaaaaaaacaccggtaaaggtggcgcactaatgcatggactaaaatacgccacgtgtgatcaagtatttttaagtgatgcagatactttcgttccacctgataatgatggaatgggctatatgctggcagaaattgagcgcggcgctgatgccgttggcggaattccctccaccgcgttaaaaggggcaggtctgctgccacatatccgcgccaccgtaaagttgccgatgattgttatgaagcgcacgctacagcagtttctgggcggtgcaccgtttattatcagcggtgcctgcgggatgttccgtactgatgtattgcgtaagttcggtttctctgatcgtactaaagtcgaagaccttgatctcacctggacgttggtggcaaacggctaccgtattcggcaggcgaatcgctgcatcgtatacccacaggaatgcaacagcccgcgtgaggaatggcgccgctggcggcgttggattgtgggctacgcggtctgtatgcgcctgcataaaagacttttatttagccgcttcggtatcttcagtatatttcctatgctgttggttgtgctttatggcgttggtatttatctcactacctggtttaatgaattcatcaccaccgggccacatggtgtggtgttggcaatgttcccgcttatctgggtcggcgtagtttgtgttattggtgcatttagcgcctggtttcatcgttgctggttgttggtgcctttagcaccgctttccgttgtgtatgtattattagcttatgccatctggattatttatggacttattgccttttttactggacgcgaacctcagcgcgacaaacccacccgctattccgcactggtggaagcgtcaaccgcttattcccacccttctgtcacaggaactgaaaaactatctgaagcttaatgctaaagagaaaaatgttcagattgcagaccaggtgattattgatgaaagtgccggtgaggttgttatcggcgcgaatacccgtatttgccacggtgccgttattcaggggccggtagtgattggcgcaaactgcctgataggtaattatgcgtttattcgtcctggcacaataatcagcaatggcgtaaaaattggttttgccaccgaaattaaaaatgcggttattgaagcggaagcaacgattggtccgcaatgctttattgccgactcggtagttgcaaaccaggcatatttgggcgcacaagtacgtaccagtaatcatcgtctggatgaacaacccgtgtctgttcgaactccagagggaattatcgctaccggatgcgataaattaggttgttatatcgggaagcgttcacgccttggtgtacaagttattattttgcctgggcgaattatttctccgaacacacaacttggcccgcgcgtgattgtagaacgtaatttacctagtggaacttactcactccgacaagaacttatccgtacaggagattaaaatgataaagcatacgttattagtgccgtttttttttagtgcattgcccgcttatgccgggttaacttccattaccgcgggctacgattttaccgattattctggcgaacatggcaaccgtaatttagcgtatgctgaactggtagcaaaagttgaaaacgcaacgctgctttttaatctttcccaggggcgtcgtgattatgaaactgaacatttcaatgccactcgcggccagggtgcagtctggtacaaatggaataactggctgacaacccgaacgggtattgcctttgcggataatacgccggtctttgcccgccaggattttcgacaggatattaacctagccctgttgccaaaaacgcttttcacgaccggttatcgctacactaaatattacgatgatgtcgaagtcaatgcctggcaaggcggcgtatcactctatactggcccggtgatcaccagttaccgctatacccattatgactccagcgatgcaggtagtagttatagcaatatgatttccgtgcgtctgaaggacccgcgcggtgctggttatacgcaactatggctaagccgcggaacaggtgcttacacctacgactggacgccagaaacacgctacggcagcatgaagagcatcagtttgcaacgaattcaaccgctgactgagcaacttaatctcgggttgacggcaggtaaagtgtggttcaacaccccaaccgatgattataacggtctgcaacttgcagcccacctgatctggaaattctaggcagcagtctatcagtatattttattcggtagttttcagagaaaagctataactcggtttgataataaacaatataattaatttcgggcaataacttattcgtatagagcaccagagaaaaggtgctctatacgaataagttattgcccgaatcgtacatcagtttaatagctgagatacttttattttatcatcaccggggtgaaggtatctttatatctctctagacaggccccctgaatctccagacaaccaatatcacttaaataagtgatagtcctgatacaagtttttagagtagtcattagtgaacagataattgttaacttagaaccagtaaaatgcaaacgacgcaccacgctgggaaaatcgctgctattcagcagaacacctgcgccgagaataatcatcgagcgcccatgcgttttatgggcggtatcggcaaattcacgggcgatggtttcaatatactggcgcggaacgccggtaatttgctcgccccaggcaggggtataaggtttgatttcagcgtaatctttcgcgctgttttcatcttccagcccgcgatcgaggccataattcgccagtaccaaatcataaacgctgacgaccggacaggtgttgccatcggctaatgtcaggtttttaacgggcaattggcgcaccaggaccggattgtgttttacgcggcgaaaatgcggattttcaatgccgccaaagtaggggaaggccacgcctgcaacggcatcatgttgaccgagcagagttaacgacaattcggtttccgtaccggcggcaatggattccagattccatttgcctttttctccccagcgaaaaccaatcgaaccgttaggcaccaccagttcacctgcggtattaactgccacggttttccactgcggattattgctttcgcccagtccatccaccaggtcagatgcgcggaccatgcgcccgggaacgtagctgccgtcgtcgcgaggttccagcattaccagcataggcatgtcgctgtagcggcggcagtagttgataaaataatcgctgggattatcgagatgaaactcttttaaaatgacatggcccattgccattgccagggcactatcagtgccttgtttcggtgccagccactggtcgcacaatttggccacttcagagtagtcaggggtaatggcgatggttttagtgcctttgtagcgtacttcggtaaagaaatgggcgtccggcgtacgtgtctgcggtacgttagacccccaggcgatgatgtaactggagttataccagtcggcagattccggtacgtcggtttgctcgccccaggtcatcggcgaggcgggcggcaggtcgcaataccagtcgtagaagcttaaacaggtgccacctaacagcgacagataacgtgttccggcggcgtaagaaaccatcgacatcgccgggatcggcgagaaaccggcaacgcgatccgggccgtaagttttgatggtccagacgttagcagcggcaatcagctggtttagctcctgccagttggagcggataaagccgccgcgtccacgtacttgtttgtagctcaggcacttttgcggatcgttcataatcgatgcccacgccagtaccggatcgctgtgttgcttgagggcttcgcgccacagttcaatcagtcgtttacgaatgagcgggtatttcaggcggttagcgctgtagagataccaggagtaacttgcgccacgcgggcagccgcgaggttcgtgatttggcaggtcagggtgagtgcgcgggtagtcggtctgttggatttcccaggtcaccagaccatttttaacgtagattttccagctacaggagcctgtacagttaacaccgtgggtggaacgcacgattttgtcgatagctgtcctcccagtcgcggttgctatgcatcacctgtccgtgaccatcggcaaaggtttcgcccttttgtttgaagtagcgaaagcgatccaaaagtttactcatgacataactcctgctccaggaatgaattgggatctgatgccttgtcggatgagacacggttgtagcctgataagacgtgtcaggcatcgatctcttatttttggctgaacttccgccgaccataaatcagccaggtcagtagcacacaaacgatgtagaagattaaaaacactttcatcgcgcccaccggagagccggtcatattgagcgacatgccaaacgcctgcggaataaaaaagccgcccactgcgccaatggctgagataaagcccagagcggctgccgtttcggtgacggcttctctttgagcttgctcatcactaccgcctttcatcttcacccgataaattgttatctggcgaaagatgacggcgatcatctggaaagtagaaccacttcccagacccgcggtcagaaacagccccataaatacggcgtaaaatgcgatgaaattaccggagcctgtgcccggtaaggtaaggaacagcagggcgctgaaaatcgccataaaaatgaagttgatcaacgttacccgcacgccgccgaatttatcggaaatagcaccaccaaccgatcgcgcgatggcaccgataaatgggccaaagaacgccaggcgcagaatattcacatccgggaactgggtttttgccagcatggcaaaacccgcagaaaaaccgataaacgaaccgaaggtggcaagataaagcaggctcagcagccagagatgcaggcgttgtaagacagggagctggtcggcaattgaggcgcgtgaactggcgatatcattcatccctgaccaggcggcgatcgtggcaatcgccagtaatggtacccaaatccatgcggcattcgccagcgacatcaccgaaccgtcggcctgcggtacgccattgacgccgagaaaggcaaatacggggacaaaaatgaccagcggtgcaaccagctgcatcacacttacacctaagtttcctaatccgccattaatcccaagagcgctcccttgtttggcttttggaaagaagaaactgatattgcccatgctcgaagcaaagttcgcacctgcaaaaccgcatagcaaagcgataacgataaatatcccaaaaggagtattcggattctgcacggcaattccgagccagacgcaaggaataatcaggattgcagtactaaaaaccgtccatcggcgtccaccgaatataggcaccataaaggagtagggaacacgcaataatgcgccagaaacggagggtaatgcggttaataaaaagagttgatcggtagtgaaattaaaaccgattttattgagattaacagtaactgcgctaaatagcatccagacacagaaggcaaaaagtaggcaactgactgatatccagaggtttcttcgtgcaatatgctttcctttattttcccagaaggccggattttctggtttccagtcgcgtaaaagataacgactatttttctcattcgccaggtgagcagtgattttcagcttatcgccggaacggtgcgcgatttgcgccagttggttgccgaaggcaaatttcgtgaagacctgtacgcgcggatcaatctctggaccttcaccttgccaggattacgccaacgccaggaagatattgaaccgaacctggattatgaagtggggcgccacgcctcactcactggcgacagcgtgcgttttaacaccgaagcgcggcgtgcctggctggcctttgcgacctctccccaggcaacatggcgcggtaactttcgcgaactttctgccagcgtcacgcggatggccacctttgccactagcggacgcatcacactggatacggtggaagatgagatcaaccgtctgcgctataactggcaggagagtcgcccctccacgcttacggcgttgctgggcgcagaggcagaaaacatcgatctcttcgaccgtatgcaactggaacacgttatcgctatctgccgccaggcaaagtcgctttctgctgccggacgtgaactgtttgacatttcgcgccagggtaaagccagcgtcaatgacgcggatcggctacgcaaatacctggcgcgttttggtctgacatgggaagcaatgcaggatcagcacagctccagttgaatatgatggtccttcagcacctgcatcacgctcgcaggcggcatcgtgtcggtgtagacagcatcgaccatgctgatgctacccatattgaccattgcgttacggccaaattttgagtggtcgacaaccagcataacgtggcgcgagttctcaatgatggcgcgtttggtgcgaacttcgtggtaatcgaactccagtagcgagccgtcgctatcgatgccgcttatccccagaatgccgaaatcaaggcggaactgggagataaaatcgagcgttgcttcgccaatgatcccgccatcgcggctgcgtaattcgccaccggcaagaatgatacggaaatcctcttttaccatcagcgtgttagcgacgttgagattgttggtcacaatgcgtaaattgctgtgattaagcagcgcgtgcgccaccgcttccgatatcgataaacagcgtcgagccattgggaatttgctccgccactttgcgggcgatgcgctctttttcttcggtctgggtggccttgcgatcgtgccacggcgtattaaccgaactggaaggcagcgccgcaccgccatgatggcgcaggatcaggttttgctctgccagctcgttgagatcgcggcgaatagtctgcgggctaacggagaaatgctctaccagctcctcggtgctgacataaccctgctgtttaaccagttcgataataccgttgtgacgttgtgtttgtttcattgataaatccctggaattattttcgttttcgcgcattgagcgaatcaacaaaagccatcgctaaacccacggctaacccggcgatgtgtgctccgttcgccatcgacatcccaaacaaatcaaaccatccggcgacaatccagatcaacgcaaagataattaacccacgttgcaggtaaatgccactttgcggatcgcgttcgccacgtagccagacgtagcccatcagcgcatacaccacgccagaaagcccgccaaaccacggcccgctgaatttttgctgcacatagccgcttaacagggcgctaatgagagtaatgacaattagcttaccgctaccgaggcgtttttccaccgcaccgccgagataccaccaccagagcaggttaaagaggatatgcatcagcgagaagtgcattaacgcgtgggtgaagtaacgccagaactcaaacttcagcgtcggatcgaatggccaagccagccataacatcacttcctgatcgccgagaatttgcatggcgataaacaccaccacgcaggcgatcatcatcacccaggttaccggacctgcgcgttcacgcaaggcggcaaagaaaggataacggcgataatgcaggccactgccggtatggcccgcctgccagctggccgccagataacgcggatctgccgggttttcgagaaaacgcgccagctccgcccgcacgcgctcggcctgggactcatccgccagccagacatcgctttggttatgttgttgaatcgtgaggataacaccctgcgtcgccatgtaatcaacaaacgcctgcgccacgcgggggttagcaaaagaggtaatcatcaacatcgttgctgtcgcttattccacacaaaaggggacagtataaagcgttacgcgccgtacgccacctctgcgggaaactggcgctgccaggcttcaaaaccgccatcaatgctgtagaccacatcgtagccctgttgcagcagatactgcgccgcgcctttgctgctattgccgtgataacacatcaccatcaccggagtgtcaaagtcgttatcacgcataaacgcgcccagcgtgtcgttggttaaatggaaagcctgcaccgcatgccccattgcgaaactctgtggatcgcgaatatcgaccagcaccgcctctttttcctgcaacttctggtgcgcgtcggcaacgttaatacattcgaactgatccatgcgtctctctttctttacaaacaagtgggcaaatttaccgcacagtttacgtcgaagcggcagataaacgccataatgttatacatatcactctaaaatgttttttcaatgtgtaccccacagcccggttttgacgagcaggtttactatctcacgttgaatagcgacagtcaggggatgagtaaagttgcgctggtgaacgccgaactggggtggggaatttacgagaaattcgacatcatgcagctacccaactttatccagtggaaaaatttaggcgcgggtgaatatgttatgggactggaggtcagtaatagttttcttgacggtcgtgataaagaacgagcgcaggggcgtctgccctttattgaaccaggggaaacaaagaaatactgctttgagctgggaattgttgatggcgatgctgaaattagcgcgttgaaagcggaaattgcaggctaccgttagttaacggcaataaaaacgccgggtagcattaacaggcccggcgttgattacgttctttgctaagcgcgatggaaacaccgcgcgtcacaaattatttttcctgaagaccgagttttttctccagatagtggatgttagtgccaccatgctggaagttttcgtcattcatgatgcggatctgcagatcaacgttggttttgataccgtcgatgatcagctcctgcagcgcattcttcatgcgagcaatcgccacgtcacggttttcaccgtagcaaatcagcttaccgatcattgagtcatagtatggcggtacggtgtagcccgcgtagatatgagactcccaacgtacgccaaaaccaccaggtgcgtggaaacgggtgattttgcccggacttggcaggaaggtgttcggatcttcggcgttgatacggcattccaccgcatggccgcgaacgtgaacttcttcttgcttgatcgacagcggttgaccggcagcgatacgcagctgttctttgatcaggtcaacgccggtgatcatttcagtaaccgggtgttctacctgaatacgggtgttcatttcgatgaaatagaactcgccgttttcgaacaggaactcgaaagtacctgcaccgcgatagccgatatcaacacacgctttagcgcaacgttcgccgatgtagcgacgcagttccggggtaatgcccggagctggtgcttcttcgaccactttctggtggcggcgctgcatggagcagtcacgttccgccagatagatagcgttgccctgaccgtcagccagtacctgaatctcgacgtggcgaggattttccaggtatttctccatgtaaaccatatcgttgctgaaagcagctttcgcttccgcacgggtcatggagatggattgtgccagttcagcgtcgccgcgcactacgcgcataccgcgaccgccgccgccgccggaggctttgataattaccggataaccaatgcgtttagcaatggcgcggtttttatccatatcgtcgcccagcgggccgtcagaacccggtacgcaaggaacgcctgcttttttcatcgccgcgattgcggatactttgtcgcccatcaggcgaatggtttctgctttcgggccgatgaagataaagccggagcgttcaacctgctcggcaaaattggcgttctcggagaggaagccgtaacccggatggattgctactgcgccggtgatttcagcggcgctgatgattgccgggatgttcagataactttttactgacggagcagggccgatacagaccgtttcatctgccagtaatacgtgttttagatcgcgatccgcactggagtgcacagcgacagtcttgatgcccagttctttacaggcacgaagaatacgcaatgcaatctcgccgcggttggcaataacaattttatccagcatgttcgcctcgttactcgatgacgaccagcggctcgtcaaattctaccagaagtgctttcacggtaccggatttgtccgcttcgatctggttcatcattttcatggcttcaacgatgcacagggtatcgcccacgttgactttctgacccacttcgatgaacgcttttgcgtccgggcttggggtgcggtagaaagtaccaaccatcggggaacgtacgatgtgaccactgatttccgctgctgctggcgcttcggtctgccagctgccgcaattgctatctggcactctgctaaaccagaaaaccgcgcgaaagtgggcggtattatgatctccgcggcgctgacctcgttcctgaccggtatcaccgagccgatcgagttctccttcatgttcgttgcgccgatcctgtacatcatccacgcgattctggcaggcctggcattcccaatctgtattcttctggggatgcgtgacggtacgtcgttctcgcacggtctgatcgacttcatcgttctgtctggtaacagcagcaaactgtggctgttcccgatcgtcggtatcggttatgccattgtttactacaccatcttccgcgtgctgattaaagcactggatctgaaaacgccgggtcgtgaagatgcgactgaagatgcaaaagcgacaggtaccagcgaaatggcaccggctctggttgctgcatttggtggtaaagaaaacattactaacctcgacgcatgtattacccgtctgcgcgtcagcgttgctgatgtgtctaaagtggatcaggctggcctgaagaaactgggcgcagcgggcgtagtggttgctggttctggtgttcaggcgattttcggtactaaatccgataacctgaaaaccgagatggatgagtacatccgtaaccactaatccgttggggagactaaggcagccagatggctgccttttttacaggtgttattcagaattgatacgtgccggtaatgctgaaattacgcggtgcgccgtagacgatagaaccttccacgttggtatcgtaggttttgtcgaacaggttattgacgttcccctgtaacgagaagtttttcgtcacctggtagcgggtgaagagatccaccagcgcgtagctaccttgctcggcgcggaaggtgccatacggtgtcacggtgtcggtatacacgcgattttgccagttaacaccaccgccgaccgtcaactctggcatgacaggcaaccggtagctggtgaacattttaaccgtggtgcgtggcagattaggattaacggcgtttccttcgttatcttctgcaatatagcgcgttgcgccaaacgtcagctgccagttgtcggtaattgcgccgttgagttcaaattccacacctttactgactgtcccatccaccgctttataggcggtttcgccgttgctgccggggataggtgtaccggtggactgagcgacattatcctgctcaatacggaagatggctaacgtggtggtcagacggctattcatccagtccgatttcagacccagctcgtagttgttaccggtgattggagtcagatatttgcctgaactgtcacgatcattttgcggctggaaaatagaggtatagctggcgtaggtcgaccagttgtcattgatgtcaaacaccagaccagcgtaaggcgtggtgtggtttttctccatgctgtaagtcagcgtatcaacccgccagttggtataacgtgcgccgaggatcagatgcagcggatcggcaagggtgacacgagtggcagcatataacgatttcatatgtgtggtatcgtcctgcgccaggctctgtggtgaccagtcggtttgtgggaaattgccattaaagttgtagaaactgccaatttcatccgggaagatgttggcccatgaactgaagtaacgattgttttgtttgctgtaactgccaccaaacattagattgtgctgacgaccaaacaattcataactaccgtcagcgaacaaatccagcgcatcaactttacgtttgccgctgttccaaccggtgccgccgacataatcaaaaccaggtccataattactgtatggcccaaccagcataccatccgctttgtttacataggcatcgacatacatcattttgctgtcaaattcgacttcagagtgggtggcattcagcgtcgcttgccaggtatcagcaaaccgctgcttcagggtcataaagaccttgttgatctctttatcgttgtacgcccagtcaggtgcggtactgcgtgcgcgatcgtaactgttgctgctgccatcagtattccagcgcggtaaaccaccccaggttgggctattaacatcaatacgctgatattcgtaaccggctgaaagcatcgtaagatcgcctaaatcagcatcgacaatgccggagaagaagcgtagcggattgcagcttccagcaccagcggatgtgcggaacaaacggcgtaaatcccatttgttttgcccgctttgtgctgtctcaccatttctgtcagatgtttcactttcctctccagttcagattactgcgacattaatctttcgttttgtttcagttgatactgcgtcatggtgagataaaaataaaacgaaagataatggttttctgatctgattcacaaaagaaacataatgaaagccactgaaacgagagtagcttgcgccaatgggtaaggtgggcttgcatttgcttaatagaaaggcgttaataggcaaaacgaaatgaaacgaaagttttacgaaaggacttactatgagtaataccgacgcttcaggtgagaagcgagtgacaggcaccagcgagcgacgagaacagatcattcaacgcctgcgccagcaaggaagtgtgcaagttaatgatctatcggcgttgtatggtgtatctactgtgacgatccgcaacgatctggcgtttctggaaaagcaggggatcgctgtgcgtgcctatggtggcgcgttgatctgcgatagcacaacgccgtcagtcgagccatcagtggaagataaaagcgcgctgaacaccgcgatgaaacgcagcgttgcgaaagctgccgttgagttgattcagcctggtcatcgggtgatcctcgactccgggaccaccacttttgagattgctcgtctgatgcgcaagcacactgacgtaattgcgatgaccaacggtatgaacgtggctaatgcgttgctggaagcggaaggcgttgagctgctgatgaccggggggcatttgcgccgtcagtcgcaatctttttacggtgatcaggctgagcaatcgctgcaaaattaccacttcgatatgctgtttcttggtgtagatgcgatcgatctggagcgcggcgtcagcacgcataatgaagatgaagcccgtttaaaccgtcggatgtgcgaagttgcggaacggatcatcgtggtcaccgattccagtaagttcaatcgttctagtttacataagatcattgatactcaacgtatcgacatgatcattgttgatgaaggcattcctgcggatagtctggaaggcctgcgaaaggctggggttgaagtgattctggtcggggagctcgcgtcttcgctgtgattcactatgcccgatagtctggaaggactgagaaaggctggggttgaagtgattctggtcggggaatgagaaaggatgcccgctggtcaacaccaatgcgttcggcgggcattgtgaacaccatcaatggctttcttctgtctcttgggtgaggctttcccagtcggcaggaggatgtcctctttttaacattttactgaatacggtataggcatctgtttttttaccgtaggtgcgcagcgtgttttcatcgttcatccatcccagaatgatgactttctctttttcactgtaacgaaagaagagacgatagcgaccagcgccaaattttacccgtgaccagtctttatttttcccagagcctaacgacttgccatgacggaatgccggtgatgatggattgaccgtgatatgctcctcaatcactttatggaccaccgccaataactttgtggcagcttttctctgataattttcaggatcttttccctttaatgcctcgacttcggcaactaaagcatcgtaggtttcctgaaaacagggatgagcatatagcgcccaaccattaaccctttgtggaaaatccattattcgtcgtcgccaatctcatcgtcaatgttgacgtccatgccagcgacaagtttctttccttgttgaatgtcgaatggacgagttttttgcgggttgttctggatatctgcatccagaaaacgcaaaaatgcattcatagtatgatcctcctgttcatctcccagtcggcacataaatacttgcccaccaggcagaatttcgtaatgaatgctgtccaggccaggcttcagttttaaggcctcacgcactggcgcggggatagttgtttgtccgcgtatagtgacctttgattcagtggtcagtacagcgttagagcgagcattagcgggcattatttactgtccttttacagcctgttttctgctcaaattataagcttgaactaaggtaatgcaaatgcattattaatggatgtgtggactttaaacaataaaaacatggcactaaggccatgttttgcgagggacgttccaaaagaaatcaggtcaccggtgccgggttaaacaccgccagctggttatgcagtccccattgatccgagaaagttttcttcttcccgctggcgacgtcgagaataaagtgaaacaacttccagcccacttcttcaatggtttcttcgccggtagcgatagtgcccgcgttaatatccattaaatcaaaccagcggttcgccagcccggtgcgggtcgccattttaatgacgggtaccgccatcaggccgtacggcgtaccacgaccggtcgtaaacacttgcacggtgatacccgaagccacctgttgcgtgccacagacaaaatcgctggctggcgtcgcggcgtaaattaatccgcgtttagtcgggcgttggccgggcgacagcacttcaacaattgcacttttacccgatttagcaatggagccgagtgccttctccaccacatttgccagaccgcctttcttgttccccggcgaagggttggcgctgcgatcggtttttcccatattgagatagttatcgtaccactccatctcctccagcagccgtttgccgacctcttcgttcacagcgcgtggtgtcagcagatgtatcgcgtcacgcacttctgtgacttctgaaaacatcaccgttgcgccgcagcgcaccaatagatcagacgcatacccaaccgccgggtttgccgttacgccagaaaacgcatcgctgccaccgcactgcatgccgacaaccagttctgaagccggacaggtttctcgctgacgttgattcagtttttgtagatggcgttcggcgacctgcaaaatatcctcgaccatggactgaaaaccgacatgcttttcatcctgcaaactcaacgttttccggcgacggatgacgtaaacccactacaggcgtgggaagcggcggatgaatatttgctgcaacagttggacgacacagaaatccgcggcccggtgttgatcctgaatgatgcctttggtgcgttaagttgtgcgctggcggaacataagccatacagcattggcgactcatacatcagcgaactggcgacgcgcgagaatttacgcctcaacgggattgatgagtcgagcgtgaagtttctcgacagcaccgccgactacccgcaacagccgggcgtggtactgatcaaagtaccgaaaacactggcgttgctggaacaacaactgcgcgcgctgcgcaaagtggtcacgccggatacacgtattattgccggtgccaaagcccgtgacatccacacttccacgctggaactgttcgaaaaagtgctcggcccgaccaccaccacgctggcatggaagaaagcgcgcctgattaactgcaccttcaacgaaccgccgttggccgatgcgccgcagaccgttagctggaagctggaaggcactgactggactatccacaaccatgcgaatgttttctcccgcactgggctggatattggcgcgcgcttctttatgcaacatctgccagagaatctcgaaggtgagattgtcgatctcggttgcggtaatggcgttattggcctgacattgctcgataaaaacccgcaggcgaaagtggtgtttgtcgatgaatcgccgatggcggttgcttccagccggttaaacgtagaaaccaacatgcccgaggcgttggatcgctgcgagtttatgatcaacaacgcgctctccggcgtggagcctttccgttttaatgctgtgctctgcaacccgccgtttcatcagcaacatgcgctgaccgataacgtcgcctgggagatgttccaccatgcccgccgctgcctgaaaatcaacggcgagctgtatatcgttgccaaccgtcacctggattacttccataaactgaagaaaattttcggcaactgcaccaccatcgccacgaataataaatttgtggtgctgaaagcagtgaagctggggcgtcgtcggtaagattgggggttacctgccggatgcggcgtaaacgccttatccggcatacgttcagcacattacccccaggtcggataagacgcggcaagcgtcgcatccggcaatgtctgcccagttctggaatcgcgcttccataaaacaaaaaatccctgtcaccatcctctacattctcttgtttagcgttgttcaacgtttatgctacatacgtgaagttatgacgcataaagaatacgatttctttaccgccgttcatcgtactaaggggaaaaaatgattgcgattgccgacatcttgcaagcaggagaaaagctaactgctgtggcaccttttctggcgggtattcagaacgaggaacaatacacccaggcgctggaactggtagatcatctgctgctcaacgatcctgaaaaccccttgctggatctggtgtgtgccaaaataaccgcgtgggaagaatcagcgcccgaatttgctgaatttaatgccatggcgcaagccatgcctggcggtatagctgtgattcgtacccttatggatcaatatggtttaaccctttccgatcttccggaaattggcagtaaatcgatggtgtcacgcgttttgagcgggaagaggaaattaacgctggaacacgctaaaaaactggcaacgcgattcggcatttctcccgccttgtttattgattaacgcgacgtgccggatgcgtcgcatccggcgcttcaaacaacgatttaaatctctagcgccagccgtgttccctgggcaattgcccgccgtgcgtccagctccatagctacatcgcagccgccaattaaatgcacagttttcccactatcaatcagcggttgctgccccgcgcagatcaccacattgtccactgctaatacctgcgtttcgccgttgatcactacatgcagcccgtcatcgtcgatcttctggtaacttacgcctgggatcattttcacgccgcgtgagagcagggtggtgcgatggatccagccggtggttttgcctaacccttgtcctggtttgctggctttgcgctggagcatcacaatctgccgtgggctacgggggatctgcatgccttgcggactcaaacctccggcctgttgcaggctactgtcgattccccactcattacagaacccggcgatattctggctggtggattcgcccggctgacttaaatacatcgccgtatcaaaaccaattccgccacaaccgatgatggcaactttgttgcccaccggcgctttgtcgcgcagtacatcgagataactcaatacattcggatgatcgatcccgtcgataggcggaacgcgcggcacgatcccactggcgaggatcgtttcatcgaacgcctgtaactgatccgctgtcacggtgtgattgagttttagcgtcacacccgtcacttcgatcatccggcggtaatagcgctgcgtttcgtaaaactcctctttctgagcttagatttttctgttcctacccagaccgtggatttggaattcattttttgtcaggtcaatgctaatcgttaaaacggccataacgcacctccactggaaggtttatcagtaatatcctaccgttgcttcatggtcggggcgtccattccattattatcggttttcctttctgtttataaatgaaaacgccagctgtattcaggctggcgtcaggggaaatgaagcctgttgagtgagattcaccggttctggtgcagaagctgcagatggcgcagggtaaggacatcttctcttgcctgcttaatacaggacaacagtgctgtttctgtggttaatggcactataccctgtatcactgcattgtcttacagcaactggtgagggctggcataagttgccggtgtttcggtagagtcacggccatccaccacgcggagtgaataaccgttttcagcggccttattaatcagttcagtgatattaacaccatcaatgtcaacgacaatgtgccccatatccagcgcctgtacgttaacgctgtcggcttccagcgtcagggccagtttcatcatttcgcctccggatacttacccagggtaatgttatttaccgttctgtaattgtcgcgggtcatcaggcctgttgcccggcgagcccggaggatatcgatgctgtttattaactgagagcgggtacaggcgctgaatcccggctggtcggtacgcaccagcgcgtatttttccacgagaaagttcaccgcatcacacagtgaaatgcctgcctcaatatgctgctcaatcacacgttcatcggcaaacggtgtgtcattcagtgtgaggccgtagtgctggtccagcagtcgggacagcagtatctgccagatttcaacaggagacgggcgagaactggccgcctgcccgggtaatacaggtaatgttttcatactgaagattttcctgatatgcagatataaaaatgggaaagtggcgtggtgaaaacaccaggccggagcagaaggttattctggtggtttactttttcgtttcaggtgtcggataaacagccagataaacgtaaccacaggagccgagggtgtcggcttcacaggtcagccccttcgcatacagtgtcacggtatgctgatggcggggattcagttcaccactggtgagcattaatttcagttgtttcatcagcagcggaaaggcctggtccagggggtacgcatctgcatcgctgaacaggcctctgataccggcacggtcggcaaggtaatgcaaccggttaccctcctgcaccagacgggcgccgaaacagggcgtcacggtgcagggtagcccccaccaggggcggtcgtgattgtcgtcgggaagtgttgtcccggggagtgtgtctgacacgataaaatccctacagaaaatcggttaagaatggtccggtggtggcgataattctgctcatcagaattcccactcagttcagggtgacgctcatcagtcggacatacgggccaaaactgtccttacggcgttcagcaaacacggccagcacaccgggaatatcctgcacttcacgaccggtatacgcttcagcactgccgtgccagcggtatttaccggtacagaacggaaaaagacgggatgtcggatgttgttggtgaatacgcatggcttcaccacgggtgataattttcataataggatacctttgaagacagaagataaaagtgaaaacaggtgtgatgtgattgtggcggtgacgggttaaagcaggccgtgttccgcaaaggagaaaacctggctgccaccgactatcagatggtccggcacccggatatccaccaggcccagtgcctgtaccagacgttccgtgataagccggtctgccttactgggtgtgacttcaccggacgggtgattgtgtgccagcaccacggctgcggcattgtgatacagggcgcgtttaatcacttcccggggatggacttccgtgcggttgatggtgccggtgaagagggtttcaccggcaatcagctgattctggttattcagatatagcacccggaattcttcacgctccagtcccgccatgttcagaatcagccattcccgtgccgcacgggtggaggtgaaggccacaccgggttcatgaagatgacggtccagggttttcagggcccgcagaatgagactgcgctcgccgggcgtcatctctccgggcagaaaggaaatctgttgcattgttcctgccccctttcagtcaatgatgcgcataatggcgtcgtattccggatgctgcagggcgtaatcccgcagacggtaataatgaaccgtcatggcataacactccgtacggcaggcgtgatgactgtacgtcatcagacaggcggcaatgccggcggcttccgggctcatttcagcgcggttaccgttcatggcattaaacagtacccatgtttcgtcatcatcgtcatccggttcgggtgccataaatgcgccaccgttgttcagggtgtacagattccagataccaccgcagtagtcttcatacagacggtccatccagccgaagacacggggctccagggtgacccactgtggaatgaggccaaaatgctgcggccagaagctgatgcgctgttcatcagggacgggagtggcaaccaactgagactggttattccctgatgcagcggccacggaaacagaaggtgtggtggaattatgcgaagaggttgtcatgagattattccttataaaaagtaaatgaatggtggaatgtctgggggaagggacagccgtgaacaggactgcgctttcagggaaacggtatcagcgcaggctctccagcagcgtttctgccatcacccacaacgcccggttgagcttaatgtcggtatcgatgctgtgaatggcccgggtatggatacgttttcctctggcactgcgaccggaaatcccgcctttcagcatattctcctggagaacgatcagatcgacgtattgctggcgaaaggggtgaaggcactggcaatcaacctggttgacccggcagctgcgggtacggtgattgagaaagcgcgtgggcaaaacgtgccggtggttttcttcaacaaagaaccgtctcgtaaggcgctggatagctacgacaaagcctactacgttggcactgactccaaagagtccggcattattcagggtgatttgattgctaaacactgggcggcgaatcagggttgggatctgaacaaagacggtcagattcaattcgtactgctgaaaggtgagccggggcatccggatgcagaagcacgtaccacttacgtgattaaagaattgaacgacaaaggcattaaaactgaacagttacagttagataccgctatgtgggataccgctcaggcgaaagataagatggacgcctggctgtctggcccgaacgccaacaaaatcgaggtggttatcgccaacaacgacgcgatggcaatgggcgcggtagaagcactgaaagcacacaacaagtccagcattccggtgtttggcgtcgatgcgctgccagaagcgctggcgctggtgaaatccggtgcactggcgggcaccgtactgaacgatgctaacaaccaggcgaaagcgacctttgatctggcgaaaaacctggccgatggcaaaggtgcggctgatggcaccaactggaaaatcgacaacaaagtagtccgcgtaccttatgttggcgtagataaagacaacctggctgaattcagcaagaaataagactgattgggcgcagtcgtttactgcgcccttattgtatggccaacaaggtaaaattatatggtcagctcaacgactccgtcttccggggaatacttgttggaaatgagcggtatcaacaagtcttttcctggtgttaaggcacttgataacgttaacttaaaagtccgaccacattctatccatgcattaatgggggaaaatggtgcgggaaaatcaacattattaaaatgcctgtttggtatttatcaaaaagactctggcaccattttattccagggtaaagagatcgatttccattccgccaaagaagcactggaaaatggtatttcgatggtacatcaggagttaaacctggtattacaacgttcggtgatggacaacatgtggctggggcgatatcccaccaaaggcatgtttgtcgatcaggacaaaatgtaccgcgaaaccaaagcgatttttgatgaactggatattgatatcgatccgcgtgcgcgcgtcggtacattatctgtttcgcaaatgcagatgatcgaaatcgccaaagcgttttcctataacgcgaaaattgtgattatggatgaaccgacttcttcgttaaccgaaaaagaggtcaatcatctgttcactattattcgtaaattaaaagagcgcggctgcggtattgtttatatctcgcataaaatggaagaaatcttccagttatgtgatgaagttaccgtattgcgcgacggtcagtggatcgctaccgaaccgctggcaggactgacgatggacaagatcatcgccatgatggttgggcgttctcttaaccagcgtttccctgacaaagaaaacaagccgggcgaagtgattctggaagtgcgtaacctgacgtcgctgcgccagccgtcgatacgcgatgtctcgtttgatctgcataaaggggagattctcggtatagccggtctggtgggagcgaaacgtaccgatattgttgagacgttatttggtattcgcgagaaatcggctggcaccattacgttgcacggcaaaaagatcaataaccataatgccaacgaagccataaaccacggatttgcactggtaactgaagagcgccgctcaacgggaatttatgcctatctggatattggctttaactcgttaatttccaatatccgcaactataaaaataaagttggtttactggataactcgcggatgaaaagcgatacccagtgggtgattgattcgatgcgggtaaaaacaccggggcatcggacgcaaattggttcgctctccggtggtaatcagcaaaaagtgattattggtcgctggctgttaacgcaaccagaaatattaatgctcgatgaaccgacgcgcggtattgatgttggggctaagtttgagatttatcagttaattgccgaactggcgaagaaaggcaaggggattattattatctcctccgaaatgccagagttgttagggataacagaccgtattctggttatgagcaatggtctcgtttccggaattgtcgatacaaaaacaacaacgcaaagcgaaattctgcgtcttgcgtctttgcacctttaagattaggggcttcccatgagtgcattaaataagaaaagttttcttacttacctgaaagagggcggtatttacgtcgttcttttagttttgctggcgattattattttccaggacccaacatttttaagtctgttgaacttaagtaatattctcacccagtcatcggtgcgtattattatcgcgcttggtgtggcagggttaattgtcacccaggggactgacctttccgcaggtcgccaggtggggctggcggcagtagtagcagcgacgttattgcagtccatggataacgccaacaaagtgttcccggaaatggcgacgatgccgattgcgctggttattctgattgtctgtgccattggtgcggtgatcggtttgatcaacggcttgattatcgcctatctcaacgtgacgccgttcattaccacgctcggtacgatgattatcgtctacggcattaactcgctctattacgactttgtcggggcatcgccaatttccggttttgacagtggtttctccacttttgcccaaggctttattgcgctggggagtttccgtctctcttacatcaccttctatgcgttgattgcggtggtgtttgtctgggtgttatggaacaaaacccgcttcggtaagaacatttttgccattggcggtaacccggaagcggcgaaagtatctggtgtcaacgtcggcctgaacctgctgatgatttacgcgttgtctggtgtgttctatgccttcggcgggatgttagaagccggacgtatcggctcagccaccaacaacctcggctttatgtatgagctggatgctatcgcggcgtgcgtggtaggcggcgtatcgttcagcggcggtgtggggacggtaattggtgtggtgaccggggtgattatttttaccgtcatcaactatggtctgacgtacatcggcgtaaacccgtactggcagtacatcatcaaaggggcgattattatcttcgccgtggcgctggattcactgaaatacgcgcgtaagaagtgatgtgattgtggtccgcattcgttcataaacgcacataacatcatgatctgtgtggttttgtagtccggataaggcgttcacgccgcatccggcgacaggaaccaaatgccggatgcaacgctggcgcgttttatccggcctacaatgagcacaacatactgatttgtatggttttgtaggccggataaggcgttcacgccgcatccggcgacaggaaccaaatgccggatgcaacgctggcgcgttttatccggcctacaatgagcacaacatactgatttgtatggttttgtaggccggataaggcgttcaagccgcatccggcgacaggaaccaaatgccggaagttactcgggttctacaacattaacctgcaggatttctatcaggccgggattatttaatccttcagccccagacgtttcgccagcctatgcaggttggcgacgtcggtttccagcatccgcgcacaggcggcccagttgtgatgattttgcgccagtgcctgacgaatggtttcacgctggaacgcttctgtcgcttcacgcaggttttgcttaacaacgggcaccgccgccacttctggcggcggcaacgtcacctcaggaaaagcaaaatgttgcgcctcaagaatcacttcatcgccgctgcgggttgctctcgccagcactaccgcccgatgaatagcatgttccagttcacgaacgttccccggaaaattgtagtgttgcagtaaatttcgcgctccggcacttaataccactcgggagagccccagccgcaaacgacactgctcgcagaaataccccgccagcagaatgacatcatcgccccgctcacgcagcggcggcactgaaagtggaaacacgctcaggcggtggaacaagtcagcgcgaaatcgccctgccagtacctcttcgcgtaagtcacggttagtcgccgccagcacgcgcacatcgacccgcaaactgcggtcatcgccaacgcgttgaatatcgccatactgcaacaccctcagcagcttggcctgcaatgccaacgacaactcgccgatctcatcgagaaacagcgtgccgttatccgccatttcaaacttcccgctgcggttactgatagcaccagtaaacgcccctttcacatgcccgaacaactcactttccgccacactttccggcagtgcggcacagttgagatagaccagcggattcaccgcccgtggcgaggcttcatgaatcgctttcgccaccagctccttaccggttcccgtctcaccgctaattaaaacgttgagatcggatgccgccacaatctcaatctcttttttcaattgcgtcatgcctggcgacagaccgatcatctgcgtctgtttcaccgcttcaaacggcgcggcttcgcctggcagcatattctggctttccagttgttcaatcagtaacgcattgcttaacgctcccgccgccagcgcagcaatcaggcgtaactcttcgtcgctgaaaacatcgaactgatcgggctgcatcccgtcgagcgtcaaggcaccgatcaggttttgcccggcaaacaacggcaaaccaacgcaggcgtgaaccttcagactctcctgccctggaatcaaaccgtcataaggatcgggcaattcgctgtctgcgggaaagcgcaccacatcacccgcgcgggcaatcgcttccagccgtggatgcccttccagcgcaaagcgtctaccgagtacatccttcgccagcccgtcgatggcaagcggaataaactgccgcgagtcgtaacgtagcaacgcagacgcatcgcactccagcacctgacgcagcgtggtgatcaggcgttgaaaacgatcctgatgaccaatcccacgctgcaattcgatggcgatattcgccagcacatcaacggaaaaactcatctttgcctcactgtcaatttgactatagatattgtcatatcgaccatttgattgatagtcattttgactactcattaatgagcataattttatttatagagtaaaaacaattagataaaaaactggcacgcaatctgcaatcagcaagacatctttttagaacacgctgaataaattgaggttgctatgtctattgtggtgaaaaataacattcattgggttggtcaacgtgactgggaagtgcgtgattttcacggtacagaatataaaacgctgcgcggcagcagctacaacagctacctcatccgcgaagaaaaaaacgtgctgatcgacaccgtcgaccataaattcagccgcgaatttgtgcagaacctgcgtaatgaaatcgatctggcagatatcgattacatcgtaattaaccatgctgaagaggaccacgccggggcgctgaccgaactgatggcgcaaattcccgatacgccgatctactgtacagccaacgctatcgactcgataaatggtcatcaccatcatccggagtggaattttaatgtggtgaaaactggcgacacgctggatatcggcaacggcaaacagctcatttttgtcgaaacgccaatgctgcactggccggacagcatgatgacttacctgacaggcgacgcggtgctgttcagtaacgatgctttcggtcagcactactgcgacgagcatctgttcaacgatgaagtggatcagactgagcttttcgagcagtgccagcgttactacgccaatatcctgacgccgttcagccgcctggtaacgccgaaaattaccgagatcctgggctttaacttgccagtcgatatgatagcgacctctcacggcgtggtatggcgcgataacccgacgcaaattgtcgagctgtacctgaaatgggcggcggattatcaggaagacagaatcaccattttctacgacaccatgtcgaataacacccgcatgatggctgacgctatcgcccaagggattgcggaaaccgacccacgcgtggcggtgaaaattttcaacgtcgcccgaagcgataaaaacgaaatcctgaccaatgtcttccgctcaaaaggcgtactggtcggcacttctacgatgaataatgtgatgatgccgaaaatcgccgggctggtggaggagatgaccggattacgcttccgtaacaaacgcgccagcgctttcggctctcacggctggagcggcggtgcggtggatcgtctttccacgcgcctgcaggatgcgggtttcgaaatgtcgcttagcctgaaagccaaatggcgaccagaccaggacgctctggagttatcgcccgtcagtgggcgctcgcgccgctgccgcagagcacggtgaatacggtggttaaagaagaaacctctgccgccacgacggctgacctcggcccacggatgcaatgcagcgtctgccagtggatttacgatccggcaaaaggcgagccaatgcaggacgttgcgccaggaacgccgtggagtgaagtcccggataacttcctgtgcccggaatgctctctcggcaaagacgtctttgacgaactggcatcggaggcaaaatgagcaacggcattgtgatcattggttcgggcttcgaccggagcgctggtgtttgaaggactggcgaaagatctcgacgaggcggctgagctggcggcttccggggagatcaccttctcgccgtgccacgaacacgactgtgtgggatcgatggcgggcgtcacctcggcctcgatgtttatgcacatcgtgaaaaacaaaacctatggcaacatcgcttataccaacatgagcgagcagatggcgaagattttgcgtatgggcgctaacgaccagagcgtgatcgaccgcctcaactggatgcgcgatgtgcagggacccatgctgcgcgacgcgatgaaaattatcggcgaaatcgatctgcgcttaatgctggcgcaggcgctgcatatgggcgatgaatgccataaccgcaataacgccgggacgacgctgctgattcaggcgctgacgccggggattattcaggcaggttattccgtcgagcaacagcgcgaagtgtttgagtttgtcgccagcagcgactacttctccggcccgacgtggatggcgatgtgtaaagcggcgatggatgcggcgcacggcatcgaatacagcaccgtggtgaccactatggcgcgtaacggcgtcgagttcggcctgcgggtcagcggcctgccggggcagtggtttaccggcccggcgcagcaggtcatcggcccgatgtttgccggttataagccggaagattcggggctggatatcggcgacagcgccatcaccgaaacctacggtattggcggatttgcgatggcgaccgcgcccgcgatcgtcgcgctggtgggcggcacggtggaagaggctatcgatttctcccgtcagatgcgtgaaatcacccttggcgaaaaccccaacgtcaccattccgctgctcggttttatgggcgtgccgtcggcaatcgacatcacccgcgtgggtagcagcggcattctgccggtgatcaacaccgctattgcccataaagatgcgggcgtcggcatgattggcgcgggcattgtgcatccacccttcgcctgcttcgagaaagccattcttggctggtgcgaacgttacggcgtctgagttacatgtttatgccggatgcgacatgaatgtcttatccggcctacgaatggcgcggaaatctgtaggcctgataagcgtggcgcttcaggcattggccaccacagccggatgcggcgtgaacgccttatccggcctacgaatggcgcggaaatctgtaggcctgataagcgtggcgcttcaggcattggccaccacagccggatgcggcgtgaacgccttatccggcctacgaatggcacgggaatctgtaggcctgataagcgtagcgcatcaggcagtctggcgttggtcaccacagccggatgcggcgtgaacgccttatccggcctacgaatggcacgggaatctgtaggcctgataagcgtagcgcatcaggcagtctggcgttggtcataaccccatcaccctctgtcgcggacataacaacatgaaagaacttgtggtcgttgccattggtggcaacagcattatcaaagataacgccagccagtcgattgagcatcaggcggaggcggtgaaagccgtggccgatacggtgctggaaatgctggcttccgattacgacattgtgctgacccacggcaacgggccgcaggtcgggctggatttacgccgcgcggagattgcccacgagcgcgaagggctgcccttaacgccgctggcgaactgtgtggcggatacgcaaggtggcattggctatctgatccagcaggcgctgaacaaccgactggcgcgtcacggcgagaaaaaagccgtcaccgtggtgactcaggtagaagtggataaaaacgatccggggtttgcccatcccatcaaacccattggcgcattctttagtgaaagccagcgtgacgaactacaaaaggcaaaccctgactggcgttttgttgaagatgccggacggggctatcgccgcgtggtcgcctcgccggaaccgaaacgtattgtcgaagcacctgccattaaggcgctgatccaacaaggctttgtggtgattggcgcgggcggcggcggaattccggtagtgcgtactgacgcgggggattaccaaagcgtggacgcggttatcgacaaagatctctctaccgcgctactggctcgcgaaattcacgccgacattctggtgatcaccactggcgtcgaaaaagtgtgtattcactttggcaaaccgcagcagcaggcgctggatcgcgtagatattgccaccatgacccgctatatgcaggaagggcatttcccacctggcagcatgttgccaaaaatcatcgcttacaaaggagggagttatgccatatatacaagtagagaaagatggtcttctgtatgaggccgagtatttctatgaggatggtatggttacagtttttggaataagaggtgggcaatccagcgtagatcttaacggaatgacagagaccgctgctgcacgcactgctttacgaaatcttattagagaaaacaaagtagatcctttatctgaataaaaataggccgtcaattatgacggctatatttgatatgtattagctctaatcttatcggatagaacacaatcaggttagatctacgagttcaaccaacggattcgaaacataccatagagttactgttcagatgaggctccctaaacggttacggtcagattttgttggctatggtagattactttgaaaacggctggcactgacaagtaaaatgcaaaggggtagtcaaaccacagacaattacgtaccttagatcttattctgagatttctttgatctaaattgagtatcacaaccaaagcgaaaggagtctaaaattgtcagatctcgtaccaaaattgccagagccagtacttcctgcattacctacaactattctgcctgccatttccgaacttactgcatcattgggtatcccccgtcatgttttggcaagagacgaggaaattcagtatgcatggcgcgaccttccccgtgaactgcgtgaaattccaccagatcttcgtggtgaactggtcgccagaatgtgtgttgctgtcagcactggcctatttgatggggcaatgaactacgcatggaatgccgctatccttcagctaagaacaaaaatacggaattttggcctacccattgtcgcgcagattctgcaatcggactttgaagaaaagcatctattggagcttcaggatagccgacttcttgaacttgcactcaagctaaacctagttaacgaagatgggttcttttttcttgatcaatgtcgtgaagttcgcaataacttttcggctgcccatccgacaatgggcagcgtaaatgatcgagaatttacaacgttcttaaaccgatgcgttcgttatgctctagctgatgcatcctctccgaaaggggtagacattggggcatttatctcggcagtcaaaggtcctagatttaatgcgaatcaacatgatgtgtgggtgcaaagacttgtagatacacacgatgctcagcgtcagatgctggttggaatggtgcatggtatctattgcgatccaaatacatcagaaccgtcgcgtttgaacgcattggatataggcagctcactaaaagaaatttttactgcatctcttcgctcagatcttgtcaacaaacatagcgagtatgcagcaaaaggagacgagccacgtcatgcggcatctctccaatttttcgagaaacttggtcttttgacgctgctaaacgagtctgagcaacatgctgtcttctaccgagcaattgagcgactttggaatgtgcataacggaacaaataatttctacaacgagccaccatttgcagaacggttattagaactgtcgctacacggagcggtaccggaaactgcacaagagcaattcgttcaggtagttgtctgctgcaatattggcaatggttacggtgtttgttgggctgcagctacaagctacgaacaattaattcgtaacttttctccaagggaaattgcaacaatgattcgtttggcaagcaacaatgacaatagtcttgggcgccgtgtaaacgcattaccgtcatgccgtgcgagatttaaagctacactcgctttaattgatccagctagtatccctagtggagttaaagcggcttacgaccatttcataaagtagcaggacgcagaggcctagaacgagaagacgatttttgggcgtcatgggtaatgcgccctcactggagcattacagtcatttcagttgagagcagcctcaacgctaattttgcagcaggtgatcgaactggctgagatcctcaggggttttgagatttttagccagttcattaggcagagtttccaatatctttgactgctagattgtgttcttaaaatccccatggataacattctctcttgtcagggaaccaatataatccgcataccactgcatcatctccctacgcccatcaagatactgtgcatggttatacgtcccgcgaatcgcgttcttatcgacgtgtgcaagctgcgtttcaatccacgctgagttaaagcctttttcatgcagaatagtactcatcgtgtggcggaaaccgtgccccgtcagcctgcctttatatcccagtaattcgataacctgattaacactttccttactgataggcttgcggggatcgtttctgccgataaagaccagcggatgatgttttgatatcggttcaagctgtttaaacagcgtaataacctgttctgagagcggcacaatatggggccgtttcatcttcatcacttctgccgggatctcccatagttttgtctcaaaatctatatcctcccagcgtgcgaaacgtagttcttgcgtgcgtacaccggttaacataatgatctgagtggctgtcttcgtgatgatactgccggtataacccgccagatcgttaaggaagtgaggaagttcattggcagtaaggaaggggaaatgtacttttttcggtgtagctaacgcgctggcaagatcgggagcggggttatagtcagctctgccagtgacaattgcatagcggaacacttcaccacagcgctgacggaccttgcgcattttctccagcgctccgcgtttctccatcttgcgcagtgcttccagtagttccattggtttaatttcagcaatagggcgcttaccgatgtagggaaagatatctttttcaaaggtgtcgatgatttcatcacgatagcgtaatgaccagcgatcggctttcgactgatgccactcgcgagcaacggcctcgaaagtgtttttcaaactcatttgcagcgcgattttttcttctttttttgcctcacccggatcgccaccagccgcaagtattttcctggcttcactgcgtttctcacgagcgtcggcaagcgttacatcggggtaaacgccaatagacagcatcttttccttaccagcgaagcggtacttcatacgccagtatttggaaccattagcgttaatcagcagatacataccgccgctatcagccagcttatagggcttttcttttggcttcgcggttttcactttaacatcggttagcgccatgacatcctccggcttttgatgaatccatcctcctggggggatttctgccagtaaccaacctgatacccccaatgcaccccttatatagcaaagatgtctttaaaaccccttgttatatctcacatttttaccattatgggggtgctgatattttaagagggaaatggcacccccgaatgcacccccaaaaacaacttgatgtgggttgaagtcggttgacctcaggatataaagaaaacctgatatataagggattagaaggggttttgttgacatcgggagagttcagaagaggcattttggcggaagatcacaggagtcgaacctgcccccaactggatttgaagtccagccgcctcaccggagacgacgatcttccgcgcctcgattgctacatggaggcggggcgcattatagctacttccttgagtttctacatcccccagatcagttttttccgcctaatacacgcagcgtattatcacgaaagcattatagttcatataaaactcatattttacaatgatatattagcgaaattaacgctaccacgatcacataaaacaagaatcataaattaataaccagatatcggaatattcgctctcgcagggatggtttacaaaatgcgttatcggtctcagcacccctatagcatcaaggaaaagcagatgaagagtgaagtgttgtccgttaaagagaaaattggttatggcatgggagacgccgccagccacattattttcgataacgtaatgttatatatgatgttcttttataccgatatttttggcattcctgccggatttgtcggaaccatgtttttggtcgctcgtgcactggatgcgatttccgatccttgcatggggttgttggccgatcgaacgcgctctcgctggggtaaatttcggccgtgggtgctgtttggcgcactgccattcgggatcgtctgtgtactggcctatagcacgccagatctcagtatgaacggaaaaatgatttatgcagcaattacttacaccctacttaccttactttataccatcgtcaatatcccttactgcgcattgggtggtgtaatcaccaatgacccgactcagcgtatctcgctgcaatcctggcgttttgtgctggcgaccgcgggaggcatgctctctactgttctgatgatgccactggttaatttaattggtggtgataataaaccactcggtttccagggcggtatcgcggtcctttccgtggtggcatttatgatgctggcattctgtttcttcaccactaaagaacgcgttgaatcattgacgctattaacagcggttatcgactgattgacaccgccgcctcttatcaaaatgaaatccaggtcgggaacgcactgaaacaaagcggtatcgcccgtaacgaactctttgtcaccacgaaactctggttgcaggataccagttacgaaggggccaaagcccagttcgaacgctctctgaatcgactgcaacttgattacgttgacctgtacttgattcaccagccatatggcgatgtccacggagcctggcgtgccatggaagagctgcaacaggccggtaaaattcgcgctattggcgtcagtaacttccatcctgaccgactggcagaccttatcgcttttaataacgtcgttccggcggtaaaccaggttgaagttaaccctttcaatcagcagctacaggccgttccctggatgcaaagtcgtggcattcagccagaagcctgggcaccgtttgcggaagggaaaaatggtctgttccagcatcctgttctcacggcaattggcgagaagtatggcaaaagcgtgggccaggttgttctgcgctggatctaccaacgaggcattgtttcactggcaaaatcagtgcgaaaagaacgcatggaagagaacatcaacattctcgattttgaactcagccctgaagatatgctgcaaattaccgccctggataccgcaaccagcgcgttcttctctcaccgcgatcccgcaatggtggaatggctgactggccgcaaacttgatgtttaagccgcgataaaagaggtattcattcaatgcaaaaacgttatctgggtaaatccggactcgaagtctccgcccttgggctcggttgcatgggcttaagccacggctacggcccggcgaccgatacccgtcaggctatcgaacttattcgtgctgcggttgaacgtggcgtcaccttcttcgataccgccgaagtgtatggtccgtatctgaatgaagaagtggtcggcgaagccttaaaaccgtttcgtgaccgcgtggtaattgccactaaattcggttttaccttcggcaatgataataagcagcagattttaaacagccgtccggaacatatccgtgaagccgttgaaggatcattacgtcgtctgaaaacagatgttattgacctgctgtatcaacaccgtgttgatccagatgttcctattgaagatgttgcaggaacggtgaaagacctcatcgcagaaggtaaggtcaaacatttcggcctgtctgaagcaggagcacaaaccattcgtcgtgcacatgcggtacaacctgtcaccgccctgcaaagcgaatattccatgtggtggcgtgagcctgaacaggaaattctgccgttgcttgaggaactgggaattggttttgtccccttcagcccactaggtaaaggtttcctgacaggggcgattaagccgggaaccactttcggcaaagatgattaccgcagcaccgtaccgcgtttcgcagcacaagccattgaagccaatgaaaaactggtcaccttgttaggtgaactggctgcggagaaaggggtaacgtctgcacaaatcgcactggcatggctattagcacaaaagccgtggattgttcccatccctggcaccactaaactgcaccggctggaagaaaacctggccgctgctgacattgttctttcgcagaaagatacgcagcagataagcgaggcgctggaaacaattaaaatcgtcggtgaacgttactcgcctgaacatcaggcacgcgtaggccgctaatacccaaacgggtccaggataaaggacccgttattcggtgtagcgaagcgcatcgatcaacaacgcaaaagctggcggatgctgcttgcggctggggtagtaaagataatacccaggaaaagttggacaccactcctgtaacacctgaataagcttgcctgactctatatactcctgaaccatgtcttcagggacacaagcgatcccaaaccctgataacgcggcatcaattctttctggcaatggactacacgtcagttgcccatcaaccttaacgcgaagcggtttcccttctcgctcgaactcccagtggtaaagcccaccggcagttggcaaacgcatgttgatgcagcgatgattttgtagctcatgaggcgtttcaggcgcagggtttgcagcaaaatacgccggcgatcccaccatggccatccgcatatccggcccaattcgcactgcaatcatatccttatccacactttcacccagccggatcccggcatcaaaacgaccgtcaacaatatcgacaaaaccagactggtggtcagtacatgatcgtaccaggcaaaatcgcccaccggcagcaggtcgatacccgcttgcttttgttgatcccagtgacgagcacgcaattcacgccctaccgccagcagttcttcacgcgtggagttccccgcccaataactctcttgcgcttttttcagctcgcgacgcaggccaacgcgagggaaaccgagggtgtgattaagaattgtcattatatgccccttatggaatttttagtatttagccgtccagatgtttacacatccataattggcggttactgtatattcctcaagcgcaaattattcatgccgaagtgaaggactttcatgatcgaagtaaaacacctgaaaacgctacaagcgttgcggaactgcggctcactcgcagccgctgcggcgacgttgcatcaaacgcaatccgccctgtctcaccagtttagcgatctggaacaacgccttggcttccggctatttgtgcgtaaaagccagccgcttcgctttacaccgcagggagaaatcctgttgcaactggcaaatcaggtgctgccgcaaattagccaggcactgcaagcctgcaatgaaccgcagcagacgcgcctgcgcattgccatagagtgccatagctgtattcagtggctgacgcccgcattagaaagtttccataagaactggccgcaggtggagatggattttaaatcgggcgtaacgtttgatccgcagcctgcgttgcaacagggcgagctggatctggtgatgacgtccgatattctgccgcgcagtggcctgcattattcgccgatgttcgactatgaagtgcgtctggtgttagcacctgaccatccactggcggcaaaaacgcgtattacaccggaagatctcgccagcgaaacgctgttgatttatccggtgcagcgtagccgactggatgtctggaggcattttcttcagccagcaggcgtcagcccgtcactgaaaagcgtcgataacaccttattgttgattcagatggttgccgcacggatgggtattgccgcactaccgcattgggtggtggagagttttgaacgccagggtctggtggtcaccaaaaccctgggcgaaggcttgtggagccgactgtacgccgccgtgcgcgatggcgagcagcgtcagccgattacagaagcgtttattcgttcagcgcgcaatcacgcctgcgatcatctgccgtttgtgaagagcgcggagcgacccacttacgatgcacccacagtgaggccaggatcaccagcgcgcctgtaataaacgttggccagtgcggctgttggtgccagatagccaggtttaccagcagccctgccggaacgtgcatattattcataatgcccagcgttccggcgtccacctgcgtcgcgccgtagttccacataaagtagccaatcccggaagccaccacgccaagaaacaccagaatgccccattgcaacgtggtttgcggcattttctgcgcatttcccagcaagaaccatgcaatcactgccaccaggaacgcgccaagatagaaccacgcaaaggcgttatgctgcggcatcgggcgagtttccatcagacgtttgtaacccaccatgccgatggcaaaagtgatattggagagttgcaccagcaataagccagtccagaaatggtcggtgacctgatcatagcgaataatcccggcaccaatcaccgccaacaaggcgctaaaagcatagccccagcgcagacggcgcttactcatgatgtcataaatcagcgtgatgtagagcggcgtcagtacggtgaacagcaacagttcggagaccgtcaggtagagataggcgcggaaactcagcatatacatcacaccgagctgcatcgcgcccaccagcatatacaggccaaccgttttcaggctattgccacgggtgcgcagaaacggcagaaaaacgagtgccgccagaccaacgcgcaccagcaccgcaaaatagctatcgacgtgccccgcaaggtactcgccataaaagctaaaggagaaggcccacagaatcgtggtgatgataagtagcgccacaatggaaaactctttgattaacgagtatccattgtagcgaagtatcaggttgacaactgaccaaataaagaacaattacgataaatagagcttacgcagataatgcggcactgcgtcttcggcgttagtaccaatcacttccagctctggatgcagatctttcagccgttgatgcgcgctgcccataatgcagcctttccccgccatcgacagcatttcggcatcgttcattccatcgccaaaggcaatacaatcttgcaggctgtagcccagtttcttcgcatggccttttgaaacgccgcccgccatcacttccaggcaggttaaggtagagaaactgacattgacgcgatcgccccagcgagcgttaatcgcctgctccagtggcagaagtttttcatgggaatcgcaggtgaagaacactttgctgacgccttccggctccagcaatcccggctcatacagcgcataattgaacaccgcttctttgaaaaagcgcatctcttccgggcgatggcgattcataaaccattcatcatcgcgataaacgttagtaatgatctccgggttgtcgttgaccacgccaaacaggtcactggcaatgtcgcgatccaggttatgagcaaaaatcaggttgccatccagatcgtgaacgcgcgcgccattggaggtaatcatgtaagacttaatctccagattatcgcgaatttgccccacatcaacgtggtgacgaccggtcgcaaacacaaagttgatgccgcgcgcggtgagcagcttcagagtttctttggcgtaaggggataacgtatggtcgggagaaagtaacgtgccatctaaatcagacgcaacaacctggtacataagaaatttaaacctctgtagagcggtttccgctgggtgagttatgcctgttgaaaaaatcaacgatagcgtggagcgcgactgagcgcattgcgtccttttcaaaaaggatctcatggtacgcacctttaattaccaacggccgtcctccttcgacaggatggcccgcagcggtgcgtagttcacaaaaacggtcgtgcatgcggttatccaccacgcgttcctcttcagcttgtaagagaagcgttggcgtggcgtcatcacccgcaccggctaacacctgttcgccagccagaatactttcgcgtacccaatggtaggtcggcccaccgacgcgaatcgttgggtcatcagcatagaaacgtaagttacgtcgatatcgctgtctgctgtgggtcagtacgttgatagcaaacggcaacgaacctttgctggaaaaattacgcgccaaaggcgtggagatggcgtttgtgacgttgcacgttggtgcgggcaccttccagccggtgcgcgtcgacaccattgaagatcacatcatgcactcggaatacgctgaagtgccgcaggatgtggtagacgcggtattggcggcgaaagcgcgcggtaaccgggtgattgcggttggtaccacctcagtacgttcgctggaaagtgcggctcaggcagcgaaaaacgatctcattgaaccgttatttgacgatacccaaatctttatctatccgggcttccagtacaaagtggtcgatgcgctggtgacgaacttccaccttccggaatcgacgctgattatgctggtttcggcatttgctggttatcaacacaccatgaatgcctataaagcggcggtagaagagaaatatcgcttttttagttacggtgatgcgatgtttatcacgtacaatccgcaggcaattaatgagcgcgttggggagtaattccgcggcgctggtttaaacgttggactgtttttctgacgtagtggagaaaaaatgaaatttgaactggacaccaccgacggtcgcgcacgccgtggccgcctggtctttgatcgtggcgtagtggaaacgccttgttttatgcctgttggcacttacggcaccgtaaaagggatgacgccggaagaagttgaagccactggcgcgcaaattatcctcggcaacaccttccacctgtggctgcgcccgggccaggaaatcatgaaactgcacggcgatctgcagtggaaaggaccaatccttaccgactccggcggcttccaggtcttcagccttggtgatattcgtaaaatcaccgaacagggcgttcacttccgcaacccgatcaacggcgacccgattttcctcgacccggaaaagtcgatggagattcagtacgatcttggttcggatatcgtcatgatctttgatgagtgtacgccgtatcctgctgactgggattacgcaaaacgctccatggagatgtctctgcgttgggcgaagcgtagccgtgagcgttttgacagtctcggaaacaaaaatgcgctgtttggtatcattcagggcagtgtttacgaagatttacgtgatatttctgttaaaggtctggtagatatcggttttgatggctacgctgtcggcggtctggctgtgggtgagccgaaagcagatatgcaccgtattctggagcatgtatgcccgcaaattccggcagacaaaccgcgttacctgatgggcgttggtaaaccagaagacctggttgagggcgtacgtcgcggtatcgatatgtttgactgcgtaatgccaacccgcaacgcccgaaatggtcatttgttcgtgaccgatggcgtggtgaaaatccgcaatgcgaagtataagagcgatactggcccactcgatcctgagtgtgattgctacacctgtcgcaattattcacgcgcttacttgcatcatctcgaccgttgcaacgaaatattaggcgcgcgactcaacaccattcataaccttcgttactaccagcgtttgatggcgggtttacgcaaggctattgaagagggtaaattagagagcttcgtaactgatttttaccagcgtcaggggcgagaagtaccacctttgaacgttgattaatattaataatgagggaaatttaatgagcttttttatttctgatgcggtagcggcaacgggtgcaccggcgcaaggtagcccgatgtctttgattttgatgctggtggtattcggtctgattttctatttcatgatcctgcgtccacagcagaagcgcaccaaagaacacaaaaagctgatggactccatcgctaaaggtgatgaagtgctgacgaacggtggcctggtcggtcgcgtaaccaaagtagcggaaaacggctacattgctatcgcactgaatgacaccactgaagtagttattaaacgtgacttcgtagctgccgttctgccgaaaggcaccatgaaggcgctgtaattaaaatttttccctaagggaattgccgtgttaaaccgttatcctttgtggaagtacgtcatgctgatcgtggtgattgtcatcggtctgctgtatgcgcttcccaacctgtttggtgaggatccggctgttcagatcactggtgcgcgcggagtcgccgccagtgagcaaacgctgatccaggtccagaaaacgttacaagaagaaaaaataactgctaagtctgtggcactggaagagggcgctattcttgcgcgcttcgactccactgacacccagctgcgcgctcgtgaagcattaatgggcgttatgggtgacaaatacgtcgtggcgcttaatcttgccccggcaacgccgcgctggctggcagccattcatgctgagccgatgaagctcggccttgacctgcgtggcggcgttcacttcctgatggaagtggatatggacaccgcgcttggcaaactccaggaacaaaatatcgatagcctgcgcagcgacctgcgtgaaaagggcatcccgtataccaccgttcgtaaagaaaacaactacggcctgagcatcactttccgcgatgctaaagctcgtgatgaagccattgcgtatctgagcaagcgccatccggacctggtgattagcagccagggcagcaaccagctgcgtgcggtaatgagcgatgctcgtctgagtgaagcgcgtgaatatgcggtgcagcagaacatcaatatcctgcgtaaccgtgtaaaccaacttggcgtggcggagccggtggttcagcgtcagggtgctgaccgtatcgttgttgaactgccaggtattcaggacactgcgcgtgcgaaagagattctgggtgcgacggcaacgctggaattccgtctggtaaacaccaacgttgatcaggccgctgcggcatccggtcgcgtaccgggcgactctgaagtgaaacagacccgcgaaggtcagccggttgtgctgtacaaacgcgtaattctgatcttgatttgccagcaaatgtcctggccgcgacgatggaaaaagacgaagcgttaaccacgattgttaaagttgaaaatccgtcgccagcattattgccatgcccgaagtcagtcactagcgcaatttcgcttttagcaaaagctgaacgaccattaattattcttggcaaaggcgcggcgtattcacaatctgatgaacagcttcgtgaatttattgaaagtgcccagattccattcctgccaatgtctatggcgaaagggatcctcgaagatacgcatccactttctgcggcagctgcgcgttcgtttgccctggcaaatgctgacgttgtcatgcttgttggtgcacgactgaattggttactggcacacggtaaaaaaggatgggcggcagatacacagtttattcaactggatattgaaccgcaggaaattgacagcaaccgccccattgctgtgccagtcgttggcgatattgcatccagtatgcaaggtatgctggcagaattgaaacaaaacacattcacgactccactggtgtggcgcgatattttaaatatccacaagcagcaaaatgcacaaaaaatgcatgaaaagttaagtacagatacccaaccattaaattactttaatgcattgggtgccgtgcgcgatgttttgcgcgagaaccaggatatttatttagttaatgaaggggcaaataccctggataatgcacgaaatattattgatatgtataaaccacgtcgtcgtctggattgtggcacctggggtgtcatgggcatcggtatgggctatgccatcggtgctagcgtgacctctggttctccggttgtcgccattgaaggtgatagtgcttttggtttcagtgggatggagattgaaacgatttgtcgatataacctgccggtgacgatcgttatttttaataatggcggcatctacagaggagacggtgttgacctcagcggcgctggtgcaccatcgccaacggatctgttgcaccatgcaaggtatgacaaattaatggatgcgtttcgtggcgttggctataacgtcaccacgacagatgaacttcgtcatgctttaaccaccggaattcagtcgcgcaaaccgaccattattaatgtggtcatcgacccagcagcaggaactgaaagtggccatattaccaaacttaacccaaaacaagtcgctggtaattaaatactgacatcgtctcctcttgccaacttattatgcgatggtaaggggacccttatcggaaatactattatgctaacattttttattggcgatttattgcctattatcgtaatcatgctgttgggttattttagcggcagacgagaaactttttcagaggatcaagctcgggcatttaataaactggtattaaactacgctcttcctgcggctctatttgtttctattacccgggcaaacagggaaatgatttttgcggacactcgcctgacccttgtatcacttgtggttattgtcggatgtttctttttctcctggttcggttgctacaaattttttaaacgtacccatgcagaagcagcagtatgtgcattaattgcaggttcacctaccattggattcctggggtttgcagttctcgatcctatttatggtgattccgtatcaacaggtttagtggtagcaattatttctattattgttaacgcaattactattcctattggtctgtatttgctgaatccttcctcaggagcggatggtaagaagaatagtaatctgagcgcattaatttctgcggcaaaggagccagtagtatgggcacctgttctggcaacgatcctggtgttggttggggtaaaaattccggcagcatgggacccaacctttaatctgattgcgaaggctaactcaggggtggcggtattcgctgcggggttgactctggctgcacataaattcgagttcagtgccgaaattgcttataacaccttcctgaagctgattctgatgccactggcgctgcttctcgtaggtatggcatgtcatttgaatagcgaacatttgcagatgatggtactggcaggcgcattaccgccggcattctccggaatcattattgccagccggtttaatgtctacacccgcactggtacagcgtcattggctgtgagcgtactgggttttgtcgtcacggctcctttgtggatttatgtcagtcgactggtttcataattaatcatgttattgattttacataaatgccgaagtgtcttttcaccttcggcttttttcaaggcataagcaaatgacaaataatgaatgcaaagggccgtttgaaggcttattagttatcgatatgacgcatgtccttaatgggcctttcggaactcaacttctttgtaatatgggtgcaagggtaattaaagttgagccgccgggtcatggtgatgatacccgcacatttggtccctatgtggatggacagtcgctctattacagttttattaatcatggaaaagagagtgtggttcttgatttaaagaatgatcacgataaaagtatatttataaatatgcttaaacaagctgatgtattagctgagaattttcgcccaggtacaatggaaaaactcgggttttcatgggaaaggttacaagaaatcaacccgcgccttatatatgcttcatcgtcaggtttcggacataccggtccgctaaaagatgctcctgcctacgataccatcattcaggcaatgagcgggataatgatggaaacaggatacccccatgcgcgttggtacctctcttgcggatctctgtggcggtgtttatttattcagtggaatagtgagtgcactttatggccgcgaaaagagccagagaggggcgcatgtcgatatagcgatgtttgatgccactctgagttttctggagcatggactgatggcatatatcgcgactgggaagtcaccacaacgcctgggaaatcgccatccctacatggcaccttttgatgttttcgatactcaggataagccgattacgatttgttgtggtaatgacaagcttttttctgcgttatgccaggcactggagcttacggaactggttaatgatccccgatttagcagcaatattttacgcgtacataaccaggctattcttaaagaatatattgagcggacgttaaaaacgcaggtagctgaagtttggttagccagaatacatgaagttggtgtgcccgtcgcgccgttattaagtgtggctgaggccattaatttaccacaaactcaggcgagaaatatgttgattgaagccgggggaataatgatgccgggtaatccgataaaaatcagcggctgcgcggacccgcatgttatgccgggagcggcaacgctcgaccagcatggggaacaaattcgccaggagttctcatcataaatgtaagatgtgctggtaaatagctcccacatttgaacattgtgggagccgctatttagtcattttgctgacagaaaacagtaatctcctggtccagctctgcaatgtgttcttttacagagttcagcaactgaagaatttcaggcttactgtcatctgaaacaggtgttatttctaactggtggctaatattaatcaacttttgcaaattcaggatgttagccgcaccgtggatgcgatgaatacactgatggaaagttctgttatcgccagcttctagtgcatgaaacgcagcgggtagatctttatgcgtttcatgctggaaagtcatgagaatctcctgcatcagttgtagatcattcgccgtattattcttcagggcctcgatatcaaggtggcgatactgaggtgcaatatgcgcaacctggtgtaactgacttaaatgtgttttcagtacatccagagtcaacggtttgaacaaacataagttcatgccgcaatttaaccctttttcacgttcgttagcctgtgcgttggctgtaagcccccagatgggtaaggaagaattttgctcacggagtttgcgagtcaactcaaaaccatccatattcggcatattaacgtcagtaataagcagatcataatgttgcatactgacttcagttcaatgctgaaccacacagccggaaccgccgtgccttcgcgcagcatgtaaaagcgataaaacggcaattttttccaccaggtggacgtcattggccgtacatacggtttacgtttagtcgtcatgttgcactccttagcgtggtttcagggtcgcgataagaaagtctttcgaactttctactttgccctgctgaatggccgcagccggatcgacgtgtttcgggcagacttcggagcagtagcccacgaaagtacagctccatacgccgttctggctgttcaactgcgccatacgctccttcttaccgtggtcgcggctatcttcgttataacgatgcgccagcgtaatggcagccggaccgatgaactctgggttcaggccaaactgcgggcacgcggcgtagcacagaccacagttgatgcaaccggagaactggtgatacttcgccatctgcgccggggtctggatgttagtaccctgatccgcggtgcgggagttgccgatgatgtacggtttgatcgcttccagactttcgatgaagtgagtcatatcgaccaccagatcgcgttcaatcgggaagttagctaacgcttcaaccttcataccgtcggtgtaatcacgcaggaaggttttacatgccagttttggcacgttgttaaccatcatgccgcaggagccacaaatcgccatacggcaggaccagcggtagctcaggtccggtgccaggttgtctttgatgtagcccagcgcatccagtaatgaggtagttgcgtcataaggcacttcatagaatgcgctatgcggtgcggtatcgacttccgggttatagcgcaccacctcaattttcaggtttttcatctcagccattcgccttctccttcttattggctgcttccgccttatccgcttcgccaccgtaaacacgtttagctggcggcagcgtagtaatcttcacgtcgctgtactccaggcgagtcgtgccatcagcatcgcggaaggcgagggtgtgtttgaggaagttgacgtcgtcacgctcggtgcaaccttcgtccagacgctggtgcgcgccgcgggactctttacgtgccattgcggagtgcgccatacattcagcaacgttcagaccgtggcccagctcaatggtgtagagcaggtcggtgttgaacacgctggaagtgtcggtgatgcgcacgcgcttgaagcgttcctgcagctctgccagcttgtcgatggttttctgcatcagttccggcgtacggtagataccgcaaccttcttccattgccatgcccatttcgtcgcggatcttagcccagttttcgccgccatcctggttaaccagatctttcagacgttgttcaacgccagctgcctgcgcttcaattgccgcttcgttgccattaccggcagttgctgcacgctctgtcgcttgttcaccggccagacgaccgaagaccaccagttccgccagcgagttggagcccagacggttcgcaccgtgcagaccaacagaggaacattcacccacggcgaacagacctttaatgcgggtttcacagttctgatcggtttcgataccgcccatggtgtagtgtgcggtcggacgtaccggaatcggttctttaaccggatcgacgccaacgtacgctttcgccagttcgcagatgaacggcagacgttcatgcagttttttctcgccgaggtgacgcaggtcgaggtaaaccacatcgccacgtggcgtggagatggtgttgcctttacgccattcgtgccagaaggcctgagaaactttgtcgcgtggacccagttccatatatttgtttttcggctcgcccagcggagtttccgggcccatgccgtaatcttgcagataacggtagccatttttgttgaccagaataccaccttcaccgcggcagccttcccagtttgcgcgagaagtcagccgggaaacgcaccagtagtaacgccttttgtgtgtcgatggtcgggcggatctcctgcgggcttttcagcagcagcacatgggtaaaggcgctggcgcgggcaaaacgttgagtaagttccaccgaatgctcgccgttatcttcatcgtagatggcgatggtggcgttggtcacttccagcgtggcggcgaacgggaacaggatcacctgaatcagcacgggtaaaatcagaattgcgcgggtttgcggttcgcgcagcagcgactgcaactctttgcggattaacgtccataagcgatgaaacatgctcttctccctaatccagccgacgtttggttttcagccacgtcaggccgataaacatcaccgccgaagcgatcaaaaacagcacgttcaccaccagtaccaccggaatattcccggcgaggaacaggctttgcagggtgctgacgaaataacgtgcgggaataatgtacgtcaccgcgcggatcaccgcgggcatactgtctatctgaaatataaagccggaaagcataatcgacggcagaaaagccgcgttcagggcgacctgagcggcattgaactggttgcgggtaatcgtggaaatcagcagccccattcccagggtactgagtaaaaacaggctggagataaaaaacagaatcagcagcgacccgcgatacggcacgccgagaataaacaccgacaccagcatacacagcaacatcgccagcatcccgagaaagtaataagggatcagcttacacagcagcagttccgtgcgggtaatctctgtggagagtaacgcctccatggtgccgcgttcccattctcgcgccaccaccagcgaggtgaggatcgcgccgatgaccgtcatgataatggtcaccgcaccggggataataaagtgctggcttattgccgccgggttaaaccagtagcgggtttgtacatcaataagcggttcaaaagtctgcccgttgtcctccgctcgctgcatttgccagatctgccagatcccttcgacatacccctgcacaaagttagcggtattcggctcactgccgtcggtgatcacctgaatcggtgcggtggcgttggcgcgctccatctgttcggcgaaatccacgggaataaccaccagaccgcgaattttccccgcctgcattttggcgatcagttcctgacggttatcgctgatggtggcgtcgatgtagggcgaaccggtcatggtgtgggtgaaatccagcgccgcttcgctacgctgttccagtaaaatcccgacgcgcagcttgctggagtcgaggttaatgccgtatccaaaaataaacagcagtagcagtgggatcactaccgcaatcagccagctactcggatcgcgaacaatctgccgcgtctctttgacgcacagcgcccgcacgcgacgccaggacaggatcggattactcattgctatgctccttatcccagtcgtggatcaactgaataaaggcttgctccatcgtgggatcgggttgctcatcgttggccgactgcgctttcaaatcgtccggtgtgccgctggcgattaatttcccgcggtacaccaggccgatgcggtcgcaatattccgcttcatccataaagtgggtggtgaccatcaccgtgacgcctttctctaccatactgttgatatgtagccaaaattcacggcgggtgaggatcttatctaagtcgttgttttaaaacaatttaatccataattttgcttgaaatcgcgtagcccctcttacaaaagggtatacgaggcgatgtctcagcgatataaactctatcgtcgaaccagcggcatttatgttgtccgcattagcattccccaacgttttcgtcgatacgcaggacagtgtgagattcatacttcaacaggcactcacgatcttcatgaagcaaagcagaagtccgcgctcctgttggcggtctggtatcagaccttacaagagtatgaacaattggattatcgaactttaagtgactgcgccccgctgcttgctggtgagggtatgatctcgctttctaactttgctcagtcagttgagttgcctgttgcgcaattaatacaggcggtgatgaaccgtaatctgcccgtattctggctggcgacggggcaggctggcttttatgttgcagcgctctctgaggctgagctagacccgcttgatggcagttacgttcttaattatggcgaagagaagggtatcgagggggttgctaaaggctatctgcaactcactgcgcaaccagcacatttacgtaacattattagcgacggttattcagaagcttcggtgttcaaaactgccggaagcgacgctaaaggcggttggtttttcacctccggttggccggtaattaaacccgatacgcttttgatcaataaagtccatgcagaaagcctaaggcttgattggctggctaagaccacgcctccagtcgctagtgttcatcctaccgtgcctcttgccgctcctgcccctactatcgataacgagtatgttaatcgaaagtattacactaagaatctgtcgtggttatgctctgaatatctaaagcatcggcgcaagggcaaggtatcggagtcggctataagtgatatccgtaactatttcagctttatgatcgaagcgatgggtgacattcagttggaagattttgatcgcgatttcctccgggcttatgagagcaaactgcgcacgatcccagcaaaccgtaatttagtcaaagctaaatatggagtgaaaacgctggatcagttaatcgccaaagcggcagaatgcggcgataaattgatgactgaggaatccgttaggaagtatatcaacggcatttatggtgcaatgaagtgggctgttgctgacggtaagctactgaaatcgccatgcgaaaacttttttccatccgatgataaagatgagcgagatcaggatcacactgacatatttgaaccgcatgaaattaaagcgattttttcgttaccgtggtttgaggctggaactgttgaacgcaatgcgcaagggcgattccatcaatattgcccgtttaactattgggcacctttgctgggcttgatgacgggggcgcgagttaatgaaatcgctcagttactgctgagtgatgttctggcagacgacggcgtctattatttgaaccttgaaagcgataatgaaagcggaaagaaactcaaaaatgctaatgctcgccgcaagattccgctccattcaaagctgattagtctcggtttcatcgactacgtgaacgccttaaaagatgcagggtatacccgtctcttcccggagcttaaaccacataaaacaaaaggctatggtaggccagtttccgcatggttcaatgaatcgttgcttgcggggcggttgaaactcgagaggaacagaagcaaatctttccattcttttcgccactcagtttcgactttgctcaaggagaagggcgttagctcagaattacgagcgcagctacttgggcatgtgcgcggcgaaactgaaacggaagtgcgatatagcaaagacctcaaaccaattcatatgattgaagtcgtggagaaaattgatttttcgttacctgatatagcggaattcaacattcctgacgggctggatgctgtcagagatgcgttgcgaagaaagcgtggcaaacaaacaggttgaatcagttactattcagttgagtgatgcttgaatgcgctgggacgcttcctggcgcattttttattaagggtggtggatttcatagtgctgaatttggagacgctcaaaacacgtttggtgaaacttgatgacctacgattgcacccgcagcccttctacgctttctgatggtagatttatcactgttttaatgctggcctctatgttgccaatgatgtcttcgcgcgggccgctgcgccagtcatcgcttgcgtaaaaagcgtcgagaaccgtagtcatgcttttagggctgacaaaggcgcgaatcaggtaatagcagtccgggtcatgcagagagttaccaaacgaaacaacatcgatcccgtggcgttggtgtaggggaacactgatttcctgcataatggcgtgaaaagcggcaccgctgcctttgcgtaaggtgtattgcagtatctcgacggttctcaaagcattatctccgcgtcgcctctggacggctcccttgttgatagcaataaagtaaaccggactgggccatgaagctactgctaatcagacagtcatccgtaagcaaaagctgcgatatgcggttcaaacgcgctgtaaggctctctggcgagtgttttaaagaaggtagtcgaaatcatggtgcagaattcgcggcgctctcatagagtgactggcgaagccagttgaaacaagcgtagcggagttcgagcaatcaatgagaaatctgggcgagctttaagctttaccgcgcttcttaacttttgagtctgtttggctctataaggataagcctgccgccgtggaaattttcggacgctatgcctgagaggggcgcttccaaacctagggcatccactttttcgctcccaacttatctggctgcatttacaccgcgaacacgttgaacgttagcagcttctggttcgtatttggttgttacgcaggagaggtaaaaacggcaggtttacttttgacggcaacgccataagacaccaaacagcagagaagtgtaattgttaaaaatgttaaaacataacttgttctttaagatgtaaacccttcctcgggggggaagccggacatatcaaccataaggccatctgagaagatagcctgtaggttgctcggttccccttgccagatgaagatcaagtcttcctcgtggtgtgacgacctttcttgaaagatgcattatgcgcaaaagaagctactcaagaatccgccgatagctactttcaccctctgcttggctgcatcaaacgcttgcgcgccctacctaccacaatcaacgttacgcagagttcccatcctgacgtcttccgctaaacagcggtgatctccacctacccggaccggtttaccgcatgaggtaggtgtcaggagagaagctagcacaccatcattttaaagaaaagtcatatatatcatatggctgcgttcatattctgaacgcagttatcgatgttaacctaaaggtatgagaacactgtcgtttttcatatacaaagggtgcttcggctcacctgtagcgtttaagacgaagcacattgtgctctctggcaatagctgtcggacggtcgttgagcgtttgaggtgtcttccttcatttccccatgcggcgacaaccagtccggcaccgctaacaagacgtatcaagtggctatcgttatctttgccaatgggatcagacgctttcatcatttcatgtcgctgggtgtgaacgaatgcgaacaggttggccatgtatacgccaccgtagccccagcttttggcaaacgatatgcagcggctcaaggtgcgatcatccttctcagcatcggcgtatgaagggtttagccctatgaaaagggcatatggttttgattcgtcccagactcgtgataacgagtagcgatattgaccgcacggtgaaaaatcgcgtctttaatcatttcggttgtccttatgaagtgatggtttcagcctaacatgtctttatccgttttaagcgccaacaaacgaccgttttctggcacctcccaatcgcacgctttcacactgttggaaaaatagccttggcttttctggcaggccatcctaatgttggcctcgttttctggcaggggtcagatggggagataacaatggcaacttttggctacggacgtgtttcgacatcgcagcaggatactgagaaccaacggctggagcttgggcaggctgggtggcaaattgattactggtttgccgatgttgttagcgggaaggttccggcaatgcaacgtaaagcattttctgaaatgctcaataaaatccgcgatggtgaaacgttggtggtagcgaagcttgatcgtctggggcgtgatgcgattgacgtcttgcaaacggtaagggcgctggctgaccgtaatatcaaggttcttgtccaccagcttggtaacacagatctcacttctgccgctgggaagttgctattatctatgctcgccgcggttgcggagatggagcgtgatctgctgattgagcgcactcaggcgggactatcacgagcaaaagccgaaggtaagaaattgggcagacctcctaaaatcgcgtcagaagcccgtagagagattttagagaaaaagaatagcggtttgagtatcagtgcgttagcgcgtcaatatggcgtttcaagagcgactgtagcagctattaccgattgaatatggagagtttatggcttacacagcaactgttatccctgtaatgattgcttctcctggtgatgtcgctgaagagagacaagtcattcgtgaaatgatccatgagtggaatgatataaattcagctcgttcaaaagtaatgttgacaccaattggatgggaaactcatacatcacccgaattaggagttaggcctcaggagttgattaatcaaagattattagtagattgtgatttattaatcggtgtgttttggactcgtctaggctcaccgactgggaacgaggccagcggaacagtcgaagaaatccaccgtcatttgaatgcgggaaaaccggcaatgatttacttttcctcaaagcctgttgcccctgaaagccttgatagagaacaatatgagtctcttaaattgttcaaaactgagtgcatgcaaaagggattgatagagtcttttaatgacttatctgatttcaaagaaaaagtccgtaggcaactttcgataattatttctagtagcccttatttgtcttctcttatatctaccattaacaattctcctgatgcgaatacaagtcaatctttgccagaaagtaatttgtccgccgatgcactcagtttgctgaaattagcatgtgtcgatgatagcggaacaatttatgtgataaggcatttaggtggcacggatattcaagcgggaaatcaatcctttggtggaagttcggctagagaggtagcccgttgggagggcgcacttaacgaactgttatcctttgattttgtgattgaaagaggggcaaaaggacaaatgtattatgttactcataaaggctggacatttcttgaatctttaaatgaataattaaatgcgaggtcattacataagtttatttttgatgttagggtgaattccctcacatttttattcgaaagaggccgcaatgacttctcctgtttttgcgttgaaaacacaaaagtattgaagcggagctagcatccccaagctgttaactaccttagcttgttgcccaaatgcctgaataatcttcgcgttctcatcgtgccagagataagtattaaatacaggcgcttcgctttcttgccacacatggcgaaacttcgctttctcatccattacctttttgcactccctgaccgggttatggtgcgttttcgcatagcattccgggttgtcatctgcacatacgatatcttttcgtgctgtctgatgctcagcacctacagcagaaaaggcgcatacgcccagcaccaatgagagagtgcccagagcaccccatacagttgcgcgtagcgtgctgatgtgctgctttgatacagcatgggcaactacactataactggcccagctaatcgcggctcccgctgcaatcggtaataaaaagtctgctcccgtcatgattccctcactttccaaaccacatcgcgcctgatagcgaacgctggtgacgcccaaccgatgatgatcatcatacttgttgggttttaaatgtcaccattggtgtttgttttgaatcaaaaaggattgtcatgatacagccgatgaatgctagtgactaagctcgctgaagtgagattggattcaaaatatctcatatggagcgtggccttacagtggtcaaaattgcacattcagtgcatgaaaaaatccctgagaatacagtttggcgagcgggtaaaagaactgcgcattgccaccggattgagccaagaggcctttgccgatcggtgcgggtttgcacgtagttatatgagcagaattgaacgtggtggctctaatgcgtctctggatgcgattgaggtgctggctaacgctctgagcgttgagccgtggcagttgttagcgcctggcccatctgaagataacgactcggaactgttggttccatacgcagccgatggttcctgttttcaccccggtttggcgagcacccgtgatggttcgtttggcgtaggtgataaagcggctcagaagcgttttggcacgtttgctgaagctcttgagtatcttcgtagcatggagacagcaaaatggcgtaggcctaatcctagcggcaactggggtatcgtatcagcggttcggtgggacaaactgagaaagtagctcaagtgtaagtttatgaatttttatgctgtatggatgaacagtattcattagatgctgatagtcttatgtttcatcagccctttgtttctataagagtgaataaaacagcaaaatgcgggtgcgttacggtggcgtttcgctttggctcttaatggcttaattcatataaataacattgagttaaatagttattctgaacaaggtctgccggggtctaactggtttcaaaatccgaacgcagtggcgtttattcaacgtccacatagctgacaaatgttctttcctcccgactcggcagacctccagaaacattaaaaggcaggtatggcacgttgatgttttatgccgccacgaacactcggtttgattccgtccagcggatcaaacttaatatgtagcccctagaacaaaaaggtcctacgattgctctcttaacagctaacaggaacgtgattacagcaggttatagagacttaggttcgagtccggccttcggcaccaagttactaaattccttacaatacagttggttagacgattaaatctgtctcttttgcctgtaagaaatgctctgttatgtcccttgaaaaagccgctgtggttgatagtggtaattgggatgttaactcatagcggcgtgtcgttccaagcgtcaaacacgtactgactcaacttgaaagctatgacgtagccaccgtctctaaacaatcccaaaacttttagtgcagcgcattttagcccgatgcccccattctgtcgccgtcgcgagacgccgcaggggataaacaggtttatggtggtcacggtacttgcagaccatatgcaagctctgccagcggttcggcctcgctccccttgggtacatggtcatcctgataagcctcactaactgacataaccctgatgaagtcgcaagaggctccgcttgttgtcttaccaccaacggggctttatggattctattgcttaatatatgattgtatcaaacttagactgcataatttaaacgaacataacaatcaggcaggggaagaatgataaagccattttctgtgaggtatggtcatgttaacgttagagagcatgtccagctgaatgatcttaattctgatacacgcatggcattgtggaattgcttatatcttttcctttggactaacaatcgtcaaactgctacagcaacaaaatgtgcgcagtctgtgtggatatattatctaaatcaacctgcggataatattcctcgttatgaaagtggatacaaaagtgataagacgttgctgactgctatccgagattatatatatggggaagcatggtatttggtatatgatttaattgagttcatcattgagagaactaattcatatattaatctatcgaagcatctcaattccatctttaaaaagcatggcgttggttataccataataaatggttgtattactcctatttcaaatgataacgaaattgaaagtgttcagaacgcagttgataatggcactgattcatcgcgtagccatttcgaaagggcgttacaactaatgacggatagagagcagccagactacagaaactcgattaaagagtctatctctgcaattgaatctttatgcaggaaaatcacgggcaatgataaaggaaccttgggggcttgtcttaaagctatagaggaaaaaggatatatacactctgcaatgaaaggcgcttttagtcagctctatggttatacaagtgatcagggtggaatacgtcatgcgctaacagaagaagatgtaaatcctaccttagctgaagctaaatttatgttagtcacttgcagtgcgttcagtaattatctgttgtcaaaaataagtgattaattacaggtttatagttacgagtgggttagttacccactccctttaaaattattcaccagactctaatcttttttctcttttctcatctctcctttttattgccaaatcgtgttgctcttgcagatacgtgcgttcttcgtttctatcgcttgaagtatatacgtctgcttttacttttttagctccttgtgcaataggtttccaatcctctcttatacctttaatttgttctgcaatttgcgtcaatgggcttctcgctcctagataacttattccttcaaatgtcgccatgtcatacacatattgtctcgtctgctctgaagtggtgaagtggtttactgaatttggccacctgaacagaggtgatatgctcacctcagaacaacacaggtgctccaatgaaaaaaagaaattttagcgcagagtttaaacgcgaatccgctcaactggttgttgaccagacatacacggtggcagatgccgccaaagctatggatgttggcctttccacaatgacaagatgggtcaaacaactgcgtgatgagcgtcagggcaaaacaccaaaagcctctccgataacaccagaacaaatcgaaatacgtaagctgaggaaaaagctacaacgcattgaaatggagaatgaaatattaaaaaaggctactgtagattcaatctgtcaatgcaacacccctttcaattatctctttcggtgttttgaacttcagtgtctttctcggtctgttgtttagctgagcagcaaccagatctagttcatgttgagtatattgggcaagacatgtctttttaggaaagtactgccgaattagcccatttgtgttctcatttgttccccgctgccaaggactctgaggatcgcagaagtaaactttaacgccggtgctgacagtaaattctagatgtctggccagttccattcctctgtcccatgtcagtgattttctgagttctgacggtaaactcaggaatttgtcggtaagagcctgatttactgagacagaatctttgcccctgagtctaaggatgatcgtataacgtgattttcggtctacaagtgtggctatatgagagttttttgtacctgagactaaatcgccctcccaatgtcccagagagcgtctgttatcgatatttcgggaacgttcgtgaattggtgttccgttcactatgttaatcgtacctctttcgcctttgcgggtatgacgcctgccatggcgaaggctatgcgaccgtcgcagatgctgtatattcaggtggtgtagcgcttcacggctacgaaagtacagcgttttataaattgtctcaggtgatattcgcagcgttttttgacgtggttttgttcgccttaaccatcctgatatttgctctggagaccatttcatctccagcttttccagaacaagctttcgcaatggtaaattttgatccagtaagcacggttttggccttttcgccattctgttggctcggttattagcatcaacagctttgtaatagcgtctgccccgattacgctgaacttcacgtgagatcgtcgaaggactgcgattcagcgcagtagctatcgcacgaatgctcattttggctgacaaaccagctcgtatctcctcgcgctcagacagtgtcagatgagctacagcccgcttatgctcatggggttttatgccgccagtatcccttaacatagtgaagatcgttccgggttttgaacccaggatattcgctatttcactgaagcctgttccgttcttccatagttcaaaaacagaggctttttcctctgctgtaaatgttcgtctcattcaaaaaacctccgcaaccccatgttttcacataactgttgcgttgaccaattgaatctacaaccgcgctcttgatgtcagactccctgaacagttctcgataatcaggaaactcagagcgcattatcctgtggtcacactctgccatgtgttcggggttcatcgcagcagctacagatactggaaaaaccgtcctgaaaaaccagacggcagacgggctgtattacgcagccaggtacttgaactgcatggcatcagccacggctctgccggagcaagaagcatcgccacaatggcaacccggagaggctaccagatggggcactggcttgctggcagactcatgaaagagctggggctggtcagttgccagcagccgactcaccggtataagcgtggcggtcatgagcacgttgctatcccgaatcatcttgagcgacagttcgccgtaacggaaccaaatcaggtgtggtgcggtgatgtgacctatatctggacgggtaagcgctgggcgtacctcgccgttgttctcgacctgttcgcaagaaaaccagtgggctgggccatgtcgttctcgccggacagcaggcttaccatgaaagcactggaaatggcatgggaaacccgtggtaagcccgtcggggtgatgttccaggcgatcaaggcagtcattatacgagcaggcagttccggcagttactgtggcgataccggatcaggcagagtatgagtcggcgtggaaactgctgggataacagcccaatggagcgcttcttcaggagtctgaagaacgaatgggtgccagcgacgggctatgtaagcttcagcgatgcagctcacgcaataacggactatatcgttggatattacagcgcactaagaccgcacgaatataatggtgggtgaaacactgtgtcaggacatttatgaacgttctcacaccggttttatttccgatgcaacggcgaatggtctgattctcatgaaactgccggaaacctggagtacaaatgagaaaatgtttgcttccggagggcagggacatgggtttgccgctgaacggggaaaccatattgtcgacagagtccgtctgaaaaacgcacggatcctcggtgataataatgccagaaatggagcagacagactggtcagcggaacagaaatccagacgaaatattgttcaactgcagtccgtagcgtcggtgcggcattcgacggacaaaacggacagtatcgttacatgggaaatcatggtcccatgcaactggaagtcccccgtgatcagtatgccggcgctgtggaaaccatgaagaataagatccgcgaaggtaaagtacccggtgtaaccgatcccgcagaagcgtcccggctgattcgtcggggacatctgacttatacccaggcccgtaatatcacccggttcgggaccatcgaatcggtcacttatgatattgccgaggggtcggttgtcagtctggcggccggagggatcagttttgccctgacggcatcggtcttctggctcagcaccggcgatcgcgatgctgccctgcagacagctgctgtccaggcaggaaaaaccttcacccgcacactggctgtctacgtcacaacccagcaacttcaccggctcagtgttgttcagggtatgctgaagcatattgatttttcgacggccagcccgactgtccggcaggcgcttcagaaggggaccggtgcaggaaatatcagtgccctgaacaaagtgatgaagggtacgctggtgacatctctggcactggtagctgtcacaaccggccctgacatgatcaaaatgttgcggggacggatctccggtgcgcagttcatcaggaatcttgccgtggcatcttccggtgtggcaggtggagctgtcgggtcagtggcgggcgggatattgttcagtccactgggaccatttggtgcactgacagggcgtgtggttggtggtgttctggggggaatgattgcctccgctgtatcaggaaaaattgccggagcgctggttgaagaagatcgcgtcaaaattctggcaatgattcaggagcaggtgacatggcttgccggcagtttcctgctgaccggacatgagattgaaaatctgaacgcgaatctggcccgtgttatcgatcagaatgctctggagatcattttcgccgccggtatacaacaacgggccgcgaccaacatgttaatcaaaccactggtggtcagtatcatcaggcaacgccccgtcatggaatatgatgcatcccatctcggcaatatggttaaccgactggaagaaacattacccccggagttaccggcataacggctattctgcgccttttacgttttatcacctgatttgtcagtgtcatcgtcatgactcagagaggtaaataccatgattcacctgttcaaaacctgcatgattaccgccttcattctggggttaacgtggtctgccccactccgggcacaggatcaacgttacatcagtatacgcaatacagatacgatatggctcccgggaaatatttgtgcttaccagttccggctggataatggcggaaacgatgaaggatttggccccctcaccatcactctgcaactcaaagacaaatatggtcagacgctggtgaccagaaaaatggaaacggaagcctttggtgacagtaatgccacgcgaaccacagacgcatttctggaaacggagtgcgtggaaaatgtcgccacaaccgaaatcattaaagcaactgaagaaagtaacggccatcgtgtcagtctgccgttatcggttttcgatccccaggactaccatccactgctgattaccgtttccggaaaaaatgttaactgatccctgaagtcagtttcatgcttcagcctctgccacaacgtatggcagaggctatttatcaggagaaaccagatatgccgggttacacacagagtatgtcctggctgaaggatctttctcatacgggcaggcggttgctgtcataaccgcttaccacaatgtgtttatccaggatgacccgggaatgcatttccgtcgggttatccgcaacgcggaaggtcagcgacgctggcgctgccggaactctgaagctgatgccggaaaacagcttaatgcgtggctcgccagtggagggcttctcagacaataaacctcattgatttcatccatcaggccgcgtcttctccgggagacgcggcttttttcatttattacaccagtaaatcttaaccaccgataaggagcaaagtatgcgattagcaagtcgttttggttatgctgcaaaccagatacgtcgtgaccgtccactgacacatgaagagctgatgcaccatgtgccggggattttcggggaagagaaacacacgtcccgaagccagaactatacgtacatccccaccatcaccgtactggaaagcctgcagcgggaaggctttcagccattcttcgcctgccagacccgtgtgcgcgacccgggccgccggggatacacaaaacacatgctgcgtctgcggcgggccggagagataaacggagaacatgtccctgaaattattctgctcaactctcatgacggtacctccagctaccagatgctgccgggttacttcaggttcgtctgccagaacggctgcgtctgtggtcagtctccgggggaagtgcgtgttccgcaccggggaaatgtggtggacagagtcattgaaggggcttacgaggtagtgggcgtgtttgaccggatagaggagaagcgtgatgccatgcagtcgctgattctgccgccaccggcacgccaggcgctggcacaggcggcactgacttaccgttatggtgacgaacatcagcccgtcaccaccgccgacattctgacgccacgacgccgggaggattacggtaaggacctgtggagtactaaacaaaataaccatacaaaccaaacacacaaacacttaacatatgaactacataaaagattacacactcttatccccgtacctgacagccccttgtttttcagctatcagctatttttaacacttaaaaattagcatctgtctgcgtcagaggttacgtctctgggggcgtcgttgtgcttgtagtataataaataaaatggagtgtcataaagtggataaggttttagattcagcgatcctttcttcggcaaataaaagaaagggtatccttgccattggcgcgcatcctgacgatatagaattaggctgtggcgcatcgctagctcgccttgcgcaaaaaggaatttatattgctaccgtggtgatgactaccggtaattctggcgtagatggaataatcgatcgccacgaagaatcacgcaacgctctaaagatattagggtgccaccaaactattcatcttaattttgctgacacccgcgctcatttacagctcaatgatatgatttctgccctggaaaacatcataaaaaatcaaattccctctgatgttgaaattatacgtgtatataccatgcatgatgctgaccgccatcaggatcatcttgcagtctatcaagcctcaatggttgcctgtcgcgctattccgcaaattctcggctatgaaacaccaagtacctggctttcatttatgcctcaggtttttgaatccgtgaaagaagaatatttttctcttaaactgactgcgttaaaaaaacataaaagtcagagccagcgagattatatgcgcccggagcgtctgcgtgcagttgctcaatttcgcgggcaacaggtcaatagcgatctgggtgaaggttttgttattcataaaatgattctttgagcaaattgcatgaaaacctggatctttatatgtatggccgtagcaatattgctatggtttctgagtacgttaaggcgtaagcccagccaaaagaaaggctgtattgacgccattatacctgcttataacgaaggcccgtgtctggcgcagtcactggataatctgctgcgtaacccttatttttgccgggtaatttgcgttaacgacggatccacggacaataccgaagcggtcatggcggaagtcaaacgcaaatggggcgaccgctttgttgccgtcacgcaaaaaaataccggtaaaggtggtgcgctgatgaatggcctcaattacgccacctgcgatcaggtttttttaagtgatgccgacacctatgttccgcccgatcaagacggaatgggctatatgctggcggaaattgagcgtggcgctgatgccgtaggcggcattccctctactgcgttgaaaggcgcgggtctgttaccacacatccgcgcgaccgtaaagttgccgatgattgttatgaagcgcacgctacagcagcttctgggcggcgcaccgtttatcatcagcggtgcctgcgggatgttccgtactgatgtattgcgtaagttcggtttctcggatcgtactaaagtcgaagaccttgatctcacctggacattggtggcaaacggctatcgtattcggcaggcgaatcgctgcatcgtatacccacaggaatgcaacagcccgcgtgaggaatggcgtcgctggcggcgttggattgtgggctacgcggtctgtatgcgcctgcataaaagacttttatttagccgcttcggtatcttcagtatatttcctatgctgttggttgtgctttatggcgttggtatttatctcactacctggtttaatgaattcatcaccaccgggccacatggtgtggtgttggcaatgttcccgcttatctgggtcggcgtagtttgtgttattggtgcatttagcgcctggtttcatcgttgctggttgttggtgcctttagcaccgctttccgttgtgtatgtattattagcttatgccatctggattatttatggacttattgccttttttactggacgcgaacctcagcgcgacaaacccacccgctattccgcactggtggaagcgtcaaccgcttattcccacccttctgtcacaggaactgaaaaactttctgaagcttaatgttaaagagaaaaatattcagattgcagaccaggtgattattgatgaaagtgccggtgaggttgttatcggcgcgaatacccgtatttgccacggtgccgttattcagggtccggtagtgattggcgcaaactgcctgataggtaattatgcgtttattcgtcctggcacaataatcagcaatggcgtaaaaattggttttgccaccgaaattaaaaatgcgggaactgacgctgtacgccagaaattgacgctttgcgtttttcagtgacaaactgcaccgcctgatcgaacaacggatccagttcttcagcgccatcgaaaccgcccacgccaccttcgctttcactgtcggaggtgatgccatcaacatactgtgggcgaccacgcgctttccagtcctgcaccacggcatgaacttcctgatcgcgaacaaaagcaccatggacacgtaccggcaacgtggagttcggcccagagtagagcatatcccccatacccagcagtgattccgcaccagcctgatcaagaatggtacgtgagtcaatcttactggatacggtaaaggcgatacgggtcggaatattcgctttaatcagaccagtaataacatcaaccgatggacgctgcgttgccagtacgaggtggatacccgcggcacgggctttttgcgccagacgtgctatcagctcttccacttttttacctaccgtcatcatcaggtcggcaaattcgtccaccaacaccacaatgtatggttcttttttcagcaccggatgctgcgcatccatactatcacccggcttccagtacgggtctggaatcggacgcatcatgcgatcggcttcagcaattttttcgttataacccgccagattacgcacacccagcgcagacatcagtttataacgacgctccatctcgttaacacaccagcgcagcgcgttggcggcatctttcatatcagtaacaacttccgttaacaggtgcggaatgccttcataaaccgaaagctccagcattttcgggtcgatcatgatgaaacgtacatcttctggctgtgctttataaagcatgctcaggatcatcgcattcaccccgacagacttaccggaaccggtagtccccgcaaccaacaagtgcggcattttcgccagatcggcaaccaccggctcaccggcgatatctttacccagcaccacggttaatggcgacggattatcgcggaatttggcgttatccaaaacttcgcgcagataaacggtttgtcgttttttattcggtaactccagacctacatagggtttgccaggaataacttcaacgacacgcaccgccaccgtcgaaagtgaacgggcaaggtcacgtgacaagttagaaatgcgcgctgcttttacgcccggtgccaggttcaattcaaagcgagtgataactggccccggagagtaattgacaacatcggctttaatacggaaatcagccagacgcgcttctaccaggcgcgccatttgttcaagcgcaaaggtatctaccggctccacttcgctcggcggcggtgtcagcaaatccagagaaggcagtggcgtcgtcggtttatgcaacggacggctgtcgccattacgcatcaacagcggatgaagcagggtatcctgcggctgtggtacaaccggctgttgcggctgctgatactgcggctgctgtgtaaccggctgttgtggctgctgatattgctgctgcggtgcaaccggttgttgcggctgttgatattgcggctgctgatactgcggctgcggtgcaaccggttgttgcggctgctgatactgcggctgcggtgctaccggttgttgcggctgctgatattgctgctgcggtgctaccggttgttgcggctgctgtacaggttcaacaattggcgtaaacagcggttcgtgtggaccatcatccagcaacgctttcattggcgaaaattcaaaatcatccagcgagaacggattcgccccagccggttgttcgccggaataacgttgttgttgagtttgagcaaactgacgagccagttctgcctctgccgcagcatctgcatcttctgtgttcacgggcacatcatgttgatactgttcgccatagcgttgctgctgcgtctgggcgaactgacgtgccagttcatcctgctgcatcgcatcgatttcatcatcgttgtactgatcgccagaatcgtactgattacgctgggcttcgcgggctttttcttctgccgcacgctgtgagggcagcttaataccgtaagacgccagttcacgacgagttggcacgcggatgcgtttcggtcgtggcaactgcgggccaatcccctctttgacctgcggacgcggtccaccgctatttatattgaaagaacaatatacaatcacgataatccatccggtgggacacctgtaaaagcggctgttggtaatgcagtcatcctgctggcaaaagacgtgatatatgacgagtacttttttgatctgcggcagtcatttttcgtgagcgttaaagatctgatggcctctggcgcaaaaggtattccggagacacagaaatatccggacgtttattgctggatcccgcttttctccataaattccggcgtggtcattaccccggtctataaaattgatccccggaaacccgtaacggtaaaaaaaccggatcagatcactgttgtttgtaattacagagaataatctcagtcttctccgctcaccgcaacagtgtttacctcgctttatcttccgttcagtaaatacaaacctccgctctggcaggtacagggcgtggtttatctccggtactcccctgcacagtaataatcatcactgaaaatactgatcccgtcacggcaaaacgccatcccatattccggcaacacaaaatcatcttccgtttataccggcttcactgacaaaacagacaacctgtattgcctgtacacaacagtttctctcctggcaggaatattcccctactgattttttacgtttctccccggttgttatgccggtgaaggtggtgcgttgttttcatcatcaacgccggctgagattaacaacatccggaggagatttttatgaccaccccagtttcgctgatggatgaccagatggtcgatatgacgtttatcactcagctgaccggcctgaccgataagtggttttacaagctcatcaaggatggggcctttccggcacccatcaaactcggccgcagctcccgctggctgaaaagtgaagtggaagcctggctgcaggcgcgtattgcacagtcccgtccgtaatttttaaccactggcccttcgcccacagcagacgcaatctccggcctgccggcggcactctgctgcctgttatcccccgtgaggaatatgaaaatgaaaccacagtatcagacccgttacgagctgctccacgaaagctaccagaaatggctgaccggcttcacccggcacgccgtatcctggggcgtgtgtcatccgaatatccactacttccagaatctgacgcccgggtgggtgtcattcaatggtgaaaaaccgaagattgccatcgtaccccggagtctgcaccggctgatttatggctctgacaaacgggccacgccgcccctggatgatgatctggtggtgaacttatgcaccagcgaacatctgctggttcatcatccgatgctggaagggattctgctgtctgaatgtgaacgtctgaggcagcgttctctggcaaataaactgatcagcctcttccgtcagtttggtggcacggagttgcgcctcaaactggtctggctttgctggcttgatttaatgaccggaaacagccttgacgactggacggagaacctgaaacggaaatcagaaaaagagctgggggaatggatcatcgaccgtcagaagcagaacgcagcactgacggatctgatggatcagtacgtgctcctggcataccgcacaacggttgacggtaaccgtaactgatgccggttgtttccggaaggtgcggcaaaatacggaaatgatgatacccccggccctgcatgctcacctgcagagcgtgttcgtcgtcatcatactgagccatgacggatgtcttaagggcatcctgtcattgctgagctggcatgctgcggtacatgcctcaccctggtgacaataagtacatggcgacagcactccctgcaccgcaaaagagatgtacacggccggatgttatggctgaatgtttcttcgtcagatattcaggaacagttgtagtaacgaattttaccgatctctgtacacggccggacgccgtcagtgtatacgggcggacgttccatgctgcatgactacatccggcccggatgtcaatgagtccgtcaggaacgcttcgcttcgaaacccggcctggataccagcgccggcacgccgggaagaagttgatatggtggttgccggacaacagcgctcctggattgactgctgcatcactcaaccacgctgaatatcaaaggagagcgttaccgattaaaagagaaacggaaagctgtggtgatgacccaaaacaacacgacaatcagtgaggatggaatggtgaaaatcagactgcatcagtgtagaaaatatactggctggcatgaaaatggcccggctcgtggcgttgacatattctctcctgagcatcctgaatgactgcagttgctgtggaaaagtaagcagtctccacccacggcaccacttaacagacattcagtaactcaccccagactttctataacgcttatcggtgcactgaaaacaggagagtgcgcttaaaaccgcagaccgcattgcgggtgttactgcatgacagcctggcggtattgtgaaatgtcggcaggaaccgatgtctgcgcagggggaacttccgtgatcgggataagtgcagaagaaatcagatcacgacgtaaacctgcagtgcctgacgctgcaagtggcattaaccatgggacgttgccgatcccggattgcggaaacaggagcactattttctgccgcggggagtacctctggcagtaaatccggctcgctcatctgaccgtctctctcccggaaaagaccagaaatgagatcgtcacctcaacagcagggaagatgtcttgacagactggttatattgcatacgatttatgaagaaaaagacagcaaatatggaggctatagcggagaacaccctacgaaattcctgtgaaaaacgattgaaaaaacgatcagattcgattcgtttttatatgctttttgggcacgtggcgatgacgaactgttgcatgtgcagaggagaatgcacccggaagcaccagaatcatccagaaaggcagaacgattacgcatcaaaccaggagacagcaatatcaggataacatactgatttaaaatgaatttacagcaatacgtgaaaacattttttacttaaaggagacagatgcgctgaagacagtgcaggtatttttatataaaaatgagaaggttacgggatgtctatccagcacactatgaccggagaatatcagtcaggcttaaaaagacaataaatacagtgagttaaatacacagagaaaacgaaaacgtagtatcagagggtacatcttacaacagagactgaatttccggtttttcataaccggcacattccggaaagagcaggctaaccggaggctttctgacaccagtccctggcagtttaatctgtacatcatgtacggatgttttgttcgcatttttaaaatcggcaaaaatgcgagaagagcagctatattgtggatgaactgaaaagtgcccgggagcaacaaaaaaggcgtgatgaacgtgctgatggttccgttccgctgaaactgtccggaaaaatccacaaacagcctgaaagtattgcccgaagtcgtggtgccccccaaaaaaactgttgaatgaaatgattgagctggcgtaccaggattttgtggcaaatgagcagcacaagactcggagttaaagactgcagggccccggttaccaattctgcagcatacacaacgaatgtatccggctcttacctgtgaggggcacgaaaattatacattgagcatgagtggataatcccgggtgagagtctcccgttttacactattcactaaaggtgaggcatatcattcagtctctctgaattcttcatttcagtaacttcagctaccttcgtttcatctcccccacgaaccggggccgcagcttgttgtatcaataccaaattgttggtcattactgtcctgtatcactgggctggcaagtgaactgaaatccgcaccttaatattctgactggctgcgtacattcatggcatgaagcggccggaacggctgagctgaaggtccgttgtgagcgaacagcggacattcactacacatggttcaaacatgaaccggagctttattgtctagctgtcagtgtactgcgatttacccgctcggttgtccagaaaatcggtctgaaatccagtcattaaagggccttagcctgacattaagcaacttggtaggcggatagataatagaaataggaatgcgcaggtctgtcatgttgcctagaacggtgacaagctgtccggtgcgaaatcattccggcagcgacaggctcatgtgtcagcccgacgcccagaccgtcaacgagcatgtggatctgcgaggcgttatcgttcgcagcgatgttaaaacgaacaatctgctcatcttctagaagcacaagtgctttaatgacattaaggcggtctatatgttgcattacagacttcctattgatctttacctgaggctgaagcaaccacgttaatccgactatttttcgattgcaccatccactatcaccatcgatcttccctgagcacaacgttcaactctcccgcgtacgccgtatacctgcgcaaggctctctgcatggatcaccgtttgcgggtcgccgctgtcgataagtttcccctctttcagcatgatgacctgggcggcatgccgcagtgcgatattgatatcgtgtaagacgaccagcgtaaccatattgcgtcttcgcgtttcgcgcgatacaacatccatcacatggaactgataattgagatccagcgcgctcagtggttcatccagcaataataatgcggggcggcgaataagcgactgtgcaagccccaccagctgcttctgaccgccggacaggctatcgaggtagttcattgccagatgtgcgatgcctagctcttcgagcagcgctatagcctgcgcctgattttgcccgcattttcagggcaaaaataatttactgcgtcgacttaacgccctcaaacgcgctgactttagtcgccatgcggatcgtatccgctgcccggtgcaaatcatctgcgccagtgatgatctgctggtgccatcagcatgttccagtgaacttcatgccgctctgcccgatagccagaaaatggtgatgcgctatggcggacacgcctgcaacgtgaccgatcccgaaacgtttaatgctctgttactcaacgggcttgccagcctgttacatcaccgtgaagccgccctgtaaggaattgctatgaacgaagccgttagcccaggtgcgcttagcaccctgttcaccgatgcccgcactcacaacggctggcgggagacacccgtcagcgatgagacgttacgggagatttatgccctgatgaaatgggggccgacatctgctaactgttctccgacacggatcgtgtttatccgcactgcagaaggaaaagaacgtctgcgcccggcgctttccagcggcaatctgcaaaaaaccctgaccgcgcccgtcaccgctatcgtcgcctgggacagtgaattttatgaacggttaccacagctgtttcctcacggcgatgcccgcagttggtttacctccagtccacaacttgccgaagaaacagcgtttcgcaacagttccatgcaggcggcctatctgatcgtcgcctgccgtgtgtcgggctttgaccgtcaatacgttgacgacgccttttttgcgggcagcacgctgaagagcaatctgctgattaatatcggctatggcgattccagcaaactttttgcgcgcctgccacgtctgtcctttgaagaagcctgcgggctgttgtaaggagcaaacaatgaacattgtcgatcaacaaacctttcgcgatgcgatgtcctgtatgggcgcggcggtcaatatcatcactacggacggtccagccgggcgcgccgggttcaccgccagcgccgtctgcagcgtgaccgacacgccgcccacattactggtgtgcctgaatcgtggggcgtccgtctggccggtattcaatgaaaatcgaacgctgtgtgtaaatacacttagcgccgggcaggagtcgctttcaaacctttttggcggcaaaacgcccatggaacaccgctttgccgccgcccgctggcagactggtgtgaccggatgcccgcaactggaagaggcactggtttcgtttgactgccgtatcagccaggtggtgagcgtcggcacccacgacattttgttttgcgccatcgaagcgattcatcgtcacgccacaccctacgggctggtgtggttcgatcgcagttatcacgcgctgatgcgccctgcttgttaacctccttaaggagacagctgatggcaatgttcggttttcctcactggcagttaaaatcgacctctacagagagcggcgtggtcgcgccggatgaacgattgccgtttgctcagacggcagtaatgggcgttcaacacgcggtggcgatgtttggcgcgacggtgttaatgccgattctgatggggctggatcccaatctttccatttttatgtcggggatcggcacgttactgtttttctttattaccggcgggcgcgtgcccagttatctcggttccagcgcggcttttgtcggcgtggtgattgccgcaacgggctttaatggtcagggaattaatccgaatatcagcatcgcgctgggcgggattatcgcctgtgggctggtttataccgtcattggcctggtggtgatgaaaatcggtacgcgctggattgaacgactaatgccgccggttgtgacgggtgcggtagtgatggcgattggcctgaacttagcgcctatcgcagtgaaaaatgtatcggcttcggcctttgatagctggatggcggtaatgacggtgctgtgtattgggctggtggccgtatttacccgtggcatgatccagcgattattgattctcgtaggattaattgtcgcctgtctgctgtatggcgtgatgaccaacgttttagggctgggaaaagccgtcgattttactctcgtcagccatgctgcctggttcggtctgccacatttttccactcctgcttttaatggtcaggcaatgatgctgattgcgcccgtggcggtgattctggtggcggaaaacttaggtcatctcaaggcggtcgccgggatgaccggacgcaatatggacccgtatatggggcgggcattcgtaggcgatgggctggcgacgatgctttctggctctgtcggcggtagcggcgtaaccacctacgccgagaatattggtgtgatggccgtgacaaaagtctactcgacgctggtgtttgttgccgctgccgtcatcgccatgctgttgggcttttcgccgaaatttggcgcgctgatccatactattccggccgcggtgattggtggtgcatcaattgttgtgttcgggctgattgccgtcgcaggcgcacggatctgggtacaaaaccgtgtggatttaagccagaacggtaatttgattatggtcgcagtaaccttagtgctgggtgcgggtgattttgctctcacactgggcggttttacgttgggagggatcggtacagccacctttggcgcgattttactcaatgcgttgttaagcagaaggttggttgacgttccaccgccagaagttgttcatcaggagccataaacagaaaaccgccggggtaaccggcggtgatggcgttttgacgagctacagacaaaaatgcatgcgtcattgattagcccggctagttgtcgcttttaccgtgactgctcttgccaccttttttacctgcttcagatgcgcgctgcgggtcatttttgaaattacccccgctgtgctgtccaccttttttacctgcttctgatgctctttcgcggtcttctgcaaaattgccggaaccgcctcgatggtttgccattactgacctccgtctgggtatagacatcatattgcatagaattaacgcggcgtatggcggctgccatattttcgctacgtgggactaagcttagtgaactgacgcgggcagacccgcgtttggtaatatcctgcaacagcttcttagcgagaatagatatcatctccaataattatccataagccgctcttatgattaaaaaaacgcgatgagataaaaatgtgtcattttgcgacaaaattacgtgcttgtgaaagttgttataaatcaaataagtggttgtgaaatttgcactctgaaaaggacgtcttatctttaaataagtggtagcgaatcgctacggaatagagataacacgaggagtggttagaaatgtatgccacgttctcttttttgacaaatgttcccttcccctggacctgtatcaacacgccttcttttaccagttgggcgaccgcttttttaacggttccccggctcacttccagcatatccataatctggtattccgaaggaatgcgatcgtcttccaccagatccccggtataaatactttctcttatccactccaccacttgttgatagagcggtatttgtgacgacttacttaatgatttcatggcgcgcacctgaacatttacagttgtctatggacaatcatggacaacttcaagcgtatagtaggtgaacgggagaaaaagaggatcgaagcgtctcacattttgagggaccaaatcgtgatcaaaaaaatgtgacgtgagtcgatatttgtcagaagtttactgcgccgtcaggaaataacggcgcgttggtaggtgttaatcttccttcggcaagcactgcaaatgcccgtgccgcacgccgcgctgggcgatgacgtcatcggcaaaatgctgcacgtcgcccatgtcacctttcaacacggcgatttccagacagtcgtcgtgattaatgtgcacatgcagagtagcaactgagagatcgtggtgatgatgctgggtggagacaatacggctggctaagtcgcgtttttcgtgttcatacacatacgacagcaccgcgaaaccttgtgtgccgtgttgttgagtggcttcctgcgccagagcgctacgcagaatatcgcggatcgcctcggaacggttgttataaccacgacgctggctcagactgtccagcgtctccagtaaatcgtcatcaagcgtgatggtgactcgttgcatttgcgttaaaccttttctgtggtgcgacggcgcacggggaatgcgggtaataccgcgttttgtagcacacgtccggcgtcagaggaaaaggttaatttatctcccaccacctgggtttcgacgatttgtccgttgtccatcaccatcacccgctgacagaagcgttccaccaggcgtaagtcgtgggtgatgaacaggcaggcggtgccaaactgttgttgcagctttttcagcaggcgaatgacgcccgcctgtaacacgagatcaaggttcgaaaccgcttcatccagaatcagcagtttcggttcgaccgccagcgcgcgagccaggcagacgcgctggagctggccgccgcttaactgcggtgggcgtttgtcgagcacgctgtcgtcgagatcgaccgccttcagcatttcactggcgcgcgccagttgttcggcttttttcagcgatagcaggtggcgcatcggttcacgcaggatctcgcgcggattcacggcgctgatggagtcctgaaacaccatttgaatatcacggcggaacgctttacgttgcgcgcgattgagcttcgccaacggttcgccgcgccagctaatatttccctgtgagggcgactctaaccctaccagcagccgcgcgagggtactttttccgcagccgctgcgccccagcagggcgacggtttcaccgcttttcagggccagggaaacgttattcagcaccgcctggtgttgatgtttgccgctaaatccaccgtgcgcgtagtgatgggaaaggtcggagacgttaagtaaagtcatgatgccagctccataccgtagagggcgagatgagcggaaaccaggctgcgcgttaccgcatgtttggggacgttaaacagcgtttctacatcgccctgttcaacaatcttaccgtgagacattaccgccacatcgtctgccagacgcgctaccacgcccatatcatgggtaaccagcagcattcccggtgcttgtttttgcataatgctttccagcagatcgaggatgcgcgcctgtgctacaacgtcgagatcggtggttggttcatcggcgatgataaacggtgattcgcacagcaccgccatcgcaatcatcatgcgctgcaacatgccgccgctcatctcgaacgggtagagcttcagcacgcgcgcggcgttttccagccccaccgcttctatggcagcggtaagcgtagcgtcatcggcgggtttccccagcgccaggcaggtttcacgcgcgtgggtgtgcatggtgtgcagcggattaaaggcactgcgcgggttctgcatgatggtggcaattttgatgccgcgcagggcgcagggagaaaccggttttccatcggccaaaatttcccccgccgtctggcgaacgccagcaggcagaatgcccagcgtcgcggcgcaggtcagcgacttcccgctgccactaccgccgactaacgccagcacacgcccacgttgcagggttaacgatacgccgtgcaccagcggctgcgcggcctgtagcgcgatattacggagttcaatctgttgtggcattagtgtgcgtgctccgtcaccagatgagggtccagatgatcgcgcagtgcgtcacccaccaggttaaaggccatcacgctgataaacagcgccagccccggccagaacatttgcagcggctgggtccagatatactgacgcgcgtcgttaatcatcacgccccattcggcggtcggcgcggtcacgccgagaccgaggaaggacatccccgcgacgtgtagcatcatatgaccgatatccagcgtcgccagcaccagcagcgaggggatcaccgcacctgccagatgatcaataaacacccgcacatggcccgcgccagaaagccgtgatgccagcacaaactcgcgctggcgcagtgaaatcaccaggctacgcaccatgcgtgcataccacgcccagtgcgacagggcgatggctataatcacattggtcaacccggtgccgagcacgccgaccataaagaacgacagaatcgaggttgggaaggtcataaacatatcagcgacgcgcatggtggcctgatcaacgcgcccgccaatcagcccggcgctgccgccaataatcagccctaatatcagcaccaacagcaggcaggccattaccgagccgagcgacacgcgggtcgctgccatcagccgcgagaaaatatcgcgccctaaatgatcggtgcccagccagtgctgcgcatccggcgagagcaggcgcgacggcaaatcaatagcctgagggtcatacggcagccaccactggctggtgagcgcaatcagcgccagcagggcgataatgatcagcgccaggcgaaccgaccagcgggaggagaggaaaaagttcacgcgtgcgctccttcatgacgacgaatacgcgggtccagcgcggcgttgagcaaatcgacaatcaaattacagaccacaaaaaccaccaccatcatcagcgtaaagcactggatcaccggatagtcacggttaaaaatcgccgacaccgcatagcgcccgacgcccggccaggcaaagatgttttcgataatcatcgtcccgccaatcagttcgccaatgtgcatccccacggcagtgatcatcggcagcgaggcattgcgcagaatatggcggcgttcggtctgtttgtcgctcagaccacgcagtcgtgcccaggtgacgtgacgctgaccggcgacgtccagcatactggcgcgcagcaaacgcgcgttaatcgccagcgacataaaggcgatggataccgcaggcaaaatgatgtgctgccagccgccgtaacccatcgcgggtagccattgcagatacaccgaaaacgccatcaccagtaaaaacgccagccagaagttaggcatcgacacgccgagaaacgcgatgaaacggacggcgaaatccggcagacgatcgcgatggcgcgccgcccagataccgagcggtacggaggtgagcagaattaataccagcgccgcacctgcaagttccagcgtggcgggcaggaaattcagcatatcgtccagcaccgggcgttggctggcgaatgagataccaaagtcaagatgcagcgccttccacaaccaggtgccatactggacgtacagcggctgatccagccccagcatagttcgagtagaggccagcatctccggcgtcggcggcaccgatggtgagcatgagttccagttgtttcatcagcagtggaaaagcctggtccagatggtatgcatccgcgtcgctgaactgccctctgataccggcgcggtcggcaaggtaatgcaactgattgccctcctgcaccagacgtgccccgaaacagggcgtcacggtgcagggtagcccccaccaggggcggtcgttgttgtcgtcgggaagtgttgtcccggggagtgtgtctgacacgataaaatccctacagaaaatcggttaagaatggtccggtggtggtggtggcgataattctgctcatcagaattcccactcagttcagggtgacgctcatcagtcggacatacgggccaaaactgtccttacggcgttcagcaaacacggccagcacaccgggaatatcctgcacttcacgaccggtatacgcttcagcactgccgtgccagcggtatttaccggtacagaacggaaaaagacgggatgtcggatgttgttggtgaatacgcatggcttcaccacgggtgataattttcataataggatacctttgaagacagaagataaaagtgaaaacaggtgtgatgtgattgtggcggtgacgggttaaagcaggccgtgttccgcaaaggagaaaacctggctgccaccgactatcagatggtccggcacccggatatccaccaggcccagtgcctgtaccagacgttcggtgataagccggtctgccttactgggtgtgacttcaccggacgggtgattgtgtgccagcaccacggcagcggcattgtgatacagggcgcgtttaatcacttcccggggatggacttccgtgcggttgatggtgccggtgaagagggtttcaccggcaatcagctgattctggttattcagatacagcacccggaattcttcacgctccagtcccgccatgttcagaatcagccattcccgtgccgcacgggtggaggtgaaggccacaccgggttcatgaagatggcggtccagggttttcagggcccgcagaatgagactgcgctcgccgggcgtcatctctccgggcagaaaggaaatctgttgcattgttcctgccccctttcagtcaatgatgcgcataatggcgtcgtattccggatgctgcagggcgtaatcccgcagacggtaataatgaaccgtcatggcataacactccgtacggcaggcgtgatgactgtacgtcatcagacaggcagcaatgccggcggcttccgggctcatttcagcgcggttaccgttcatggcattgaacagtacccatgtttcgtcatcatcgtcatccggttcgggtgccataaatgcgccaccgttgttcagggtgtacagattccagataccaccgcagtagtcttcatacagacggtccatccagccgaagacacggggctccagggtcacccactgtggaatgaggccaaaatgctgcggccagaagctgatgcgctgttcatcagggactatggtggcaaccagttgttgcaggccagtctccggtgcacaggccgaagaggtggtgttctgagacaatgttttcatgtatgaaatccttgtaatgtgaataaatgagagggagtaaaggtcgggagctggcaacatcacgttcatcactgaccgtgagacccggtaatatcagggatgaatgatattcggctgaaattccggacagccgtacgcgtaaccgttccggtcacagacggatggccagatgccattgcctgtactcagtctgcacagactgagctctccggggcgtcgggtgattctggtgcctgaatcacgccttcagggacagattgcatcagcgcaggctctccagcatcgtttctgccatcacccacaatgcacggttgagcttaatgtcggtatcaatgctgtgaatggcccgggtatggatacgttttccttttgcactgcgaccggaaatcccgcctttcagcatattctcctggatggtctgatatgcgctccacaggtctttaccgtaatcctcccggcgtcgtggtgtcagaatgtcggcggtggtgactggctgatgttcgtcaccataacggtaagtcagtgccgcctgtgccagcgcctggcgtgtcggtggcggcaggaccagcgactgcatggcatcacgcttttcctcaatccggtcaaacacgcccaccacctcgtaagccccttcaatgactctgtccaccacatttccccgatgcggaacacgcacttcccccggagactgaccacagacgcatccgttctgacagacgaacctgaagtaacccggcagcatctggtagctggaggtaccgtcatgggagttgagcagaatgatttcagggacatgttctccgtttatctctccggcccgccgcagacgcagcatgtgttttgtgtatccccggcggcccgggtcgcgcacacgggtctggcaggcgaagaatggctgaaagccttcccgctgcaggctttccagtacggtgatggtggggatgtacgtatagttctggcttcgggacgtgtgtttctcttccccgaaaatccccggcacatggtgcatcagctcttcatgtgtcagtggacggtcacgacgtatctggtttgcagcataaccaaaacgacttgctaatcgcatactttgctccttatcggtggttaagatttactggtgtaataaatgaaaaaagccgcgtctcccggagaagacgcggcctgatggatgaaatcaatgaggtttattgtctgagaagccctccactggcgagccacgcattaagctgttttccggcatcagcttcagagttccggctgcgtcagcgtcgctgaccttccgcgttgcggataacccgacggaaatgcattcccgggtcatcctggataaacacattgtggtaagcggttatgacagcaaccgcctgcccgtatgagaaagatccttcagccaggacatactctgtgtaacccagcatatctgttttctcctgataaataaaaagcctctgccacgcgttgtgacagaggctgaagcatgaaactgacttcagggatcagttaacattttttccggaaacggtaatcagcagtggatggtagtcctggggatcgaaaaccgataacggcagactgacacgatggccgttactttcttcagttgctttaatgatttcggttgtggcgacattttccacgcactccgtttccagaaatgcgtctgtggttcgcgtggcattactgtcaccaaaggcttccgtttccatttttctggtcaccagcgtctgaccatatttgtctttgagttgcagagtgatggtgagggggccaaatccttcatcgtttccgccattatccagccggaactggtaagcacaaatatttcgacctgagtggacttgaaccaccgacctcacccttatcaggggtgcgctctaaccacctgagctacaagcctgtagaggttttactgctcattttcatcagacaatctgtgtgagcactgcaaagtacgcttctttaaggtaaggaggtgatccaaccgcaggttcccctacggttaccttgttacgacttcaccccagtcatgaatcacaaagtggtaagcgccctcccgaaggttaagctacctacttcttttgcaacccactcccatggtgtgacgggcggtgtgtacaaggcccgggaacgtattcaccgtggcattctgatccacgattactagcgattccgacttcatggagtcgagttgcagactccaatccggactacgacgcactttatgaggtccgcttgctctcgcgagatcgcttctctttgtatgcgccattgtagcacgtgtgtagccctggtcgtaagggccatgatgacaaacccagctcgcgtaccactttaaatggcgaacagccatacccttgggacctacttcagccccaggatgtgatgagccgacatcgaggtgccaaacaccgccgtcgatatgaactcttgggcggtatcagcctgttatccccggagtaccttttatccgttgagcgatggcccttccattcagaaccaccggatcactatgacctgctttcgcacctgctcgcgccgtcacgctcgcagtcaagctggcttatgccattgcactaacctcctgatgtccgaccaggattagccaaccttcgtgctcctccgttactctttaggaggagaccgccccagtcaaactacccaccagacactgtccgcaacccggattacgggccaacgttagaacatcaaacattaaagggtggtatttcaaggtcggctccatgcagactggcgtccacacttcaaagcctcccacctatcctacacatcaaggctcaatgttcagtgtcaagctatagtaaaggttcacggggtctttccgtcttgccgcgggtacactgcatcttcacagcgagttcaatttcagtttaaaagcttccttatcagcgaaaaaaattaaagcgcaagattgttggtttttgcgtgatggtgaccgggcagactaaaggctatccttaaccagggagctgattatgaaaaacgccacatgcttaactgacgatcaacgctggcaatctgtcttagcccgcgacccgaatgccgacggcgaattcgttttcgccgtgcgcaccacaggcatcttttgccgtccgtcttgccgcgccagacatgctttgcgggaaaacgtttctttctatgccgatgccagtgaggcgcttgccgctggctttcgcccctgcaaacgttgtcagccagacaaagccaatccccaacaacatcgccttgataaaatcacccacgcctgccgactgctggaacaggaaacgcctgtaacgctggaatccttagccgaacagctggcgatgagtccgttccatttgcatagattgtttaaagcgactaccggaatgacgccgaaagcctggcagcaggcctggcgtgctcgccgattgcgggagtctctggcaaaaggggagagcgtgactcaggcgattctcagtgccggattccccgacggcagcagttactaccgtaaagccgatgaaacgctgggcatgacggctaaacaattccgtcacggtggcgaaaatctggcggtgcgttacgcgctggctgattgtgagctgggccgttgcctggtggcagaaagcgagcgggggatttgcgcgatattgttgggcgatgatgatgcgacattaatcagcgagttgcagcagatgtttcccgctgccgacaacgcgcctgccgatctgacgtttcagcaacatgtgcgtgaagtgatcgccagcctcaatcaacgcgatacgccgctgacgttaccgctggatattcgcggcactgcttttcagcaacaagtctggcaggcactgcgcacgataccttgtggtgaaaccgtcagttatcagccatcggcaaaccgaaagcggtacgggccgttgccagcgcctgtgccgccaacaagctcgctatcgttataccttgtcatcgggtggtccgtggtgatggctcactttccggttaccgctggggcgtgtcgcgcaaagcgcaactgctgcgccgcgaagttgaaaatgaggagaggtaatgttggatctgtttgccgatgctgaaccgtggcaagaaccactggcggctggagcggtgattttgcaccgttttgcttttaacgctgcggagcaactgatccgcgatattaatgacgttgccagccagtcgccgtttcgccagatggtcactccaggcggatataccatgtcggtggcgatgaccaactgcgggcgtctgggctggaccacccatcggcagggttatctctattcgcccattgatccgcaaacaaataaaccgtggcccgccatgccgcagagttttcataatttatgtcaacgtgcggctacggcggcgggctatccagatttccagccagatgcttgtcttatcaaccgctacgctcctggcgcgaaactgtcgctgcatcaggataaagacgaaccggatctgcgcgcgccgattgtttctgtttctctgggcttacccgcgatttttcaatttggcggcctgaaacgaaatgatccgctaaaaagattgttgctggaacatggcgatgtggtggtatggggcggtgaatcgcggctgttttatcacggtattcaaccgttgaaagcggggtttcatccactcaccaccgactgccgctacaacctgacattccgtcaggcaggtaaaaaagaataaaaataagaattattattgctgtgcgcgcgaagatgtttaaactgcgggctgtaattcattgtccgggttttctgcatggaacttcttgtacttgtctggcggcagtatcgctggccatttatcagtgtgatggcgctaagcctcgccagtgcggcattaggcattggcttaattgcttttatcaatcagcgccttatcgaaacggcggataccagtctgctggtgttgccggagtttctgggattattgttgctgttgatggcagtcactctcggatcgcaactggcgctcaccactttggggcatcacttcgtttaccgactgcgtagtgaatttatcaagcggattctggatacccacgtcgagcgcattgaacaacttggtagcgcttcgttgctggcggggttaaccagcgatgtgcgcaatatcaccattgcttttgtgcgtctgccggaactggtgcaggggatcattctcactatcggttcagcggcgtatttgtggatgctgtcgggcaaaatgttgctggtaacggctatctggatggcagtcaccatctggggcggttttgtgctggtggcgcgggtgtacaaacatatggcgaccctgcgtgaaaccgaagataagctgtacacggattttcaaactgtactcgaagggcgcaaagagctgactctgaaccgtgaacgcgccgagtatgtgtttaacaacctctacattcctgatgcgcaagagtatcgccatcatattattcgcgcagactgggtttactaacccgattcaggcaactcacgaagaaattatggcgatttatcgcgcagcgatgtaatcatcattcccacaacggctggcgagttgtcagccgctttttcaactatctcaaaacttgctttttttgagatagtttctctttcctgctatacactatctcaatattgcgcttttttgagataagcacatggctatcaaatcacctcccggacttattcctttatcacacttatcgggtgaggaactcctggcccacctgcgctttaaccgggttaccgatgaaaaaggacgttatctgccttttgatgagttgcagtaccgcatcaaaaaaggagaaaacgtcgatgtggcgtggacgcttacccgtctggcgcgcaacgcggcgatccaacgaattaattattgcaatgaagcgggtgaacaggccggattcaacattaccccggtgattgcagaagcgtgcgagcttgtcgacaaacgtgctaccgcgctggcgctgaaagatcagactgaacggttacgcggggccggagccgagttaagccagttacgcctggaagagccgatcaccagctcccagctggaaggtgcgaatactacaacgctggtggcgagaaaaatgctggaaacagggcggtcgccacgcactgaagacgagcatatgattgcgggaaatgcccggctgatggcggaaattccgcacttactcgcagaaccgctgacacctgcgcttattcgccagttacatgccattggtatgggtggaatcaatgacgcgaaatatcgtccgggagaatttcgtgaaacagatgatgttgtgatcgccgactatgatggcaatatagtgcatcaaccgcccgctgcggcattgttaccggaacggctggaaaaagtttgccagtggttaaacagccatgaagggtatattcatccgttggtccgtgcctgcattctgcattttatgctggcccatgaacatccgtttcgggatggcaacgggcgcaccagtcgggcgctgttttactggtatatgctgaaatcgggctacgatgtctttaaatatatttccatcagcagtttgcttcatgctgcaccggtcaaatatgccgccagctaccagtacactgaatcagatggtatggatctgacttatttccttgaatatcaggcgggtgtcattaaacgtgctctgcaaaactggcagcagcatatcgatgaaattacacaacgaagcgcaaaactcgatagtgtgctgtttagctctggtgtgcttaaacgcctgaatccgcgccaggtgatgctcgccaatccggggaaagagtacacagttgctgaaattagtgtgagtctgagcgtctcggataatacggcgcggaccgatttacggacaattgttaaagaaggattcgcgcaagagaaaagaattaataaccagcaagcagtgtacgtcgcacactacccgctgtagcttttgcccgtaaattcgtgatagccgtcgtaaagctgttaccgactggcgaagatttcgccagtcacgtctacccttgttatacctcacaccgcaaggagacgatcatgaccaataatcccccttcagcacagattaagcccggcgagtatggtttccccctcaaattaaaagcccgctacgacaactttattggcggcgaatgggtagcccctgccgacggcgagtattaccagaacctgacgccggtgaccgggcagctactgtgcgaagtggcgtcttcgggcaaacgagacatcgatctggcgctggatgctgcgcacaaagtgaaagataaatgggcgcacacctcggtgcaggatcgcgcggcgattctgtttaagattgccgatcgaatggaacaaaaccttgaacttttagcgacggcagaaacctgggataacggtaaacccattcgcgaaaccagtgctgccgacgtgccgctggcgattgatcattttcgctattttgcctcgtgtattcgggcgcaggaaggtgggatcagtgaaattgatagcgaaaccgtggcctatcatttccatgagccgttaggcgtggtggggcagattatcccgtggaacttcccgctgctgatggcgagctggaaaatggctcccgcgctggcggctggcaactgtgtggtgctgaaacccgcacgtcttactccgctttctgtactgctgctaatggaaatcgtcggtgatttactgccgccaggggtggtgaacgtggtcaacggcgcaggtggggaaattggcgaatatctggcgacctcgaaacgcatcgccaaagtggcgtttaccggctcaacggaagtgggtcaacaaattatgcaatacgccacgcaaaacattattccggtgacgctggagctgggcggcaaatcgccaaatatcttctttgctgatgtgatggatgaagaagatgcctttttcgataaagcgctggaaggctttgcactgtttgcctttaaccagggcgaagtttgcacctgtccaagccgtgctttagtgcaggagtctatctacgaacgctttatggaacgcgccatccgccgtgtcgaaagcattcgcagcggtaacccgctcgacagcgtgacgcaaatgggcgcgcaggtttctcacgggcaactggaaaccatcctcaactacattgatatcggtaaaaaagagggcgctgatgtgctcaccggcgggcggcgcaagctgctggaaggcgaactgaaagacggctactacctcgaaccgacgattttgtttggtcagaacaatatgcgcgtgttccaggaggagatttttggcccggtgctggcggtaaccaccttcaaaacgatagaagaagcgctggagctggcgaacgatacgcaatatggcctgggcgcgggcgtctggagccgcaacggtaatctggcctataagatggggcgcggcattcaggctgggcgcgtgtggaccaactgttatcacgcttacccggcacatgcggcgtttggcggctacaaacaatcaggcattggccgcgaaacccacaaaatgatgcttgagcattaccagcaaaccaagtgcctgctggtgagctactcggataaaccgttggggctgttctgatgtgaaaggctgcccggcgtgtattgccgggcactatcaggtatggctactgcccgtaataggcattggccccatgcttacgcaggtagtgcttatccagcagttcgttttgcatcgcagggagctgtggcgcaagctggcgcgagaacagacccatataggcgcactcttccagtaccacggcgttatgcaccgcatcggcggcattttttccccaggcgaacgggccgtgagaatgcaccagtaccgccgggatttgtgccgggttcaacccacgctcttcgaaggttttaatgatcacttcgccggtctggtattcatactcgccgttgatctcttctgcggtcatcaggcgcgtgcaggggatggctccgtaaaaataatcggcgtgagtagtgccccaggcggggagatcaagtccggcctgcgaccagatggtggcgtggcgcgagtgggtatgcactatgccgccaatctccgcaaagcgacggtaaagcgccagatgcgttggcgtgtcggaagagggctttttgctgccttccaccaccttgccgctggctatctcaaccaccaccatatcgtcggcggtcattacctcatactcaacgccggaaggcttaatcaccatccattgccgcgtttcgtctatcgcgctgacattgccccaggtgaacgtcaccagatgatgaacgggaagcgccaggtttgccgccagcacgtcagctttcagttgctctaacatataaatccggcctcctgcatacgcgcttcaatccagcgccgcgcctgaataatctccagcaccggctctttggctttttcggtccacatttcaatcagaaatgatccgcgatagttcagctcatgcagcgttttgaagatgccaacaaaatcgacacagccttcgccaaacggcacatcgcggaactgtccggggctatgttcggtaacgggttgagtgtctttcaggtggatggcggcgatacggtcgatgcccagtttcagttcggcgggaacatcattgccccaggcgctgaggttgccgacgtccgggtagacggtgaaccacggcgaggcgagcatctcgtcccattttttccatttgctgatggagttcatagctggacttcgaattcgatccgaaggacaacctgttcgtacgtatcgaccgtcgccgtaaactacctgcgaccatcattctgcgtgccctgaactacaccacagagcagatcctcgacctgttctttgaaaaagttatctttgaaatccgtgataacaagctgcagatggaactggtgccggaacgcctgcgtggtgaaaccgcatcttttgacatcgaagctaacggtaaagtgtacgtagaaaaaggccgccgcattactgcgcgccatattcgccagctggaaaaagacgacgtcaagctgatcgaagtcccggttgagtacatcgcaggtaaagtggttgctaaagactacattgatgagtctaccggcgagctgatctgcgcagcgaacatggagctgagcctggatctgctggctaagctgagccagtctggtcataagcgtatcgaaacgctgttcaccaacgatctggatcacggcccatatatctctgaaaccttacgtgtcgacccaactaacgaccgtctgagcgcactggtagaaatctaccgtatgatgcgccctggcgagccgccgactcgtgaagctgctgaaagcctgttcgagaacctgttcttctccgaagaccgctatgacttgtctgcggttggtcgtatgaagttcaaccgttctctgctgcgcgaagaaatcgaaggttccggtatcctgagcaaagacgacatcattgatgttatgaaaaagctcatcgatatccgtaacggtaaaggcgaagtcgatgatatcgaccacctcggcaaccgtcgtatccgttctgttggcgaaatggcggaaaaccagttccgcgttggcctggtacgtgtagagcgtgcggtgaaagagcgtctgtctctgggcgatcaggatatgatcaacgccaagccgatttccgcagcagtgaaagagttcttcggttccagccagctgtctcagtttatggaccagaacaacccgctgtctgagattacgcacaaacgtcgtatctcggcacttggcccaggcggtctgacccgtgaacgtgcaggcttcgaagttcgagacgtacacccgactcactacggtcgcgtatgtccaatcgaaacccctgaaggtccgaacatcggtctgatcaactccctgtccgtgtacgcacagactaacgaatacggcttccttgagactccgtatcgtaaagtgaccgacggtgttgtaactgacgaaattcactatctgtctgctatcgaagaaggcaactacgttatcgcccaggcgaactccaacctggatgaagaaggccacttcgtagaagacctggtaacttgccgtagcaaaggcgaatccagcttgttcagccgcgaccaggttgactacatggacgtatccacccagcaggtggtatccgtcggtgcgtccctgatcccgttcctggaacacgatgacgccaaccgtgcattgatgggtgcgaacatgcaacgtcaggccgttccgactctgcgtgctgataagccgctggttggtacgggtatggaacgtgctgttgccgttgactccggtgtaactgcggttgctaaacgtggtggtgtcgttcagtacgtggatgcttcccgtatcgtaatcaaagttaacgaagacgagatgtatccgggtgaagcaggtatcgacatctacaacctgaccaaatacacccgttctaaccagaacacctgtattaaccagatgccgtgtgtgtctctgggtgaaccggttgaacgtggcgacgtgctggcagacggtccgtccaccgacctcggtgaactggcgcttggtcagaacatgcgcgtagcgttcatgccgtggaatggttacaacttcgaagactccatcctcgtatccgagcgtgttgttcaggaagaccgtttcaccaccatccacattcaggaactggcgtgtgtgtcccgtgacaccaagctggggccagaagagatcaccgctgacatcccgaacgtgggtgaagctgcgctctccaaactggatgaatccggtatcgtttacattggtgcggaagtgaccggtggcgacattctggttggtaaggtaacgccgaaaggcgaaactcagctgaccccagaagaaaaactgctgcgtgcgatcttcggtgagaaagcgtctgacgttaaagactcttctctgcgcgtaccaaacggtgtatccggtacggttatcgacgttcaggtctttactcgcgatggcgtagaaaaagacaaacgtgcgctggaaatcgaagaaatgcagctcaaacaggcgaagaaagacctgtctgaagaactgcagatcctcgaagcgggtctgttcagccgtatccgtgctgtgctggtagccggtggcgttgaagctgagaagctcgacaaactgccgcgcgatcgctggctggagctgggcctgaccgacgaagagaaacaaaatcagctggaacagctggctgagcagtatgacgaactgaaacacgagttcgagaagaaactcgaagcgaaacgccgcaaaatcacccagggcgacgatctggcaccgggcgtgctgaagattgttaaggtatatctggcggttaaacgccgtatccagcctggtgacaagatggcaggccgtcatggtaacaagggtgtaatttctaagatcaacccgatcgaagatatgccttacgatgaaaacggtactccggtagacatcgtactgaacccgctgggcgtaccgtctcgtatgaacattggtcagatcctcgaaacccacctgggtatggctgcgaaaggtatcggcgacaagatcaacgccatgctgaaacagcagcaagaagtcgcgaaactgcgcgaattcatccagcgtgcgtacgatctgggcgctgacgttcgtcagaaagttgacctgagtaccttcagcgatgaagaagttatgcgtctggctgaaaaccttctcgtcagaactgttcgttctggcggcacttgagtctcgcggcacgctggccgacatcctgaaagcagcaggggcgaccaccgccaacattactcaagcgattgaacaaatgcgtggaggtgaaagcgtgaacgatcaaggtgctgaagaccaacgtcaggctttgaaaaaatataccatcgaccttaccgaacgagccgaacaaggcaaactcgatccggtgattggtcgtgatgaagaaattcgccgtaccattcaggtgctgcaacgtcgtactaaaaataacccggtattgattggtgaacccggcgtcggtaaaactgccatcgttgaaggtctggcgcagcgtattatcaacggcgaagtgcccgaagggttgaaaggccgccgcgtactggcgctggatatgggcgcgctggtggctggggcgaaatatcgcggtgagtttgaagaacgtttaaaaggcgtacttaacgatcttgctaaacaggaaggcaacgtcatcctgtttatcgacgaattacataccatggtcggcgcgggtaaagccgatggcgcaatggacgccggaaacatgctgaaacctgcactggcgcgtggtgaattgcactgcgtaggtgccacgacgcttgacgaatatcgccagtacatcgaaaaagatgctgcgctggaacgtcgtttccagaaagtgtttgttgccgagccttctgttgaagataccattgctattctgcgtggcctgaaagaacgttacgagctgcaccaccatgtgcaaattactgacccggcaattgttgcagcagcgacgttgtctcatcgctacatcagctgccggataaagccatcgacctgatcgatgaagcagcatccagcattcgtatgcagattgactcaaaaccagaagaactcgaccgactcgatcgtcgtatcatccagctcaaactggaacaacaggcgttaatgaaagagtctgatgaagccagtaaaaaacgcctggatatgctcaacgaagaactgagcgacaaagaacgtcagtactccgagttagaagaagagtggaaagcagagaaagcctcgctttctggtacgcagaccattaaagcggaactggaacaggcgaaaatcgctattgaacaggctcgccgtgtgggtgacctggcgcggatgtctgaactgcaatacggcaaaatcccggaactggaaaagcaactggaagccgcaacgcagctcgaaggcaaaactatgcgtctgttgcgtaataaagtgaccgatgccgaaattgctgaagtgctggcgcgttggacgggaattccggtttctcgcatgatggaaagcgagcgcgaaaaactgctgcgtatggagcaagaactgcaccatcgcgttattggtcagaacgaagcggttgatgcggtatctaacgctattcgtcgtagccgtgcggggctggcggatccaaatcgcccgattggttcattcctgttcctcggcccaacgggtgtggggaaaacagagctttgtaaggcgctggcgaactttatgtttgatagcgacgaggcgatggtccgtatcgatatgtccgagtttatggagaaacactcggtgtctcgtctggttggtgcgcctccgggatatgttggttatgaagaaggtggctatctgaccgaagcggtgcgtcgtcgcccgtattccgtcatcctgctggatgaagtggaaaaagcgcatccggatgtcttcaacattctgttgcaggtactggatgatgggcgtctgactgacgggcaggggagaacggtcgacttccgtaatacggtcgtcattatgacctctaacctcggttccgatctgattcaggaacgttttggtgaactggattatgcgcacatgaaagagctggtgctcggtgtggtaagccataacttccgtccggaattcattaaccgtatcgatgaagtcgtcgtcttccatccgctgggtgaacaacacattgcgtcgattgcgcagattcagttgaaacgtctgtacaaacgtctggaagaacgtggttatgaaatccacatttctgacgaggcgctgaaactgctgagcgagaacggttacgatccggtctatggtgcacgtcctctgaaacgtgctatccagcagcagatcgaaaacccgctggcacagcaaatactgtctggtgaattggttccgggtaaagttattagcgattgaaattgactcaacagatgctctgccacctattgaacaacaattttatgagacatccagcaaaggcaaaattcctctgttgcaacggttattaagcttgcatcagccatcctcttgcgtggtgttttgcaataccaaaaaagattgccagtctgtctgcgacgcgctgaatgaagtagggcaaagtgcattgtcgttacacggcgatctggagcaacgcgatcgcgatcagaccctggtacgttttgctaacggtagcgcccgtgtactggtcgcgactgatgttgctgcgcgtggtctggatataaaatcgcttgagctggtggtgaactttgagctggcgtgggaccctgaagttcatgtacatcgcatcggtcgtacagctcgtgcaggaaatagcggtctggcgatcagtttctgtgccccggaagaagcacagcgggccaatatcatttctgacatgttgcagataaaacttaactggcaaacgctgccagcgaatagttccattgtgccgctggaagcagaaatggcaacgttgtgtatcgatggcgggaaaaaagccaaaatgcgcccgggtgatgtattaggtgcgctgacaggagacatcgggcttgatggcgcagatattggcaaaatcgccgtgcatccggcgcatgtttatgtcgcggtgcgtcaggctgttgctcataaagcatggaaacagttacagggcgggaagattaaaggaaaaacgtgccgggtgcggttattaaaataatgaaatgttgaattgcagggtgcaagagtaaacatcttcttaggcattgccggatgcgacgctggccgcgtcttatccggcctccataagagtagcccgatacgcttgcgtatcgggcgctatcctggttatttcacttcaaccacattcagccgtaactcatccaactgattttcatcttcttctggctgccagcccgctggttgtagtgggatctcttcgcgatcaaacgccagatcaccacttcagaaccgtgggtaatgcctttgaaatcgaacaggttggtatcgcacagatgcgacggcaccacattctgcattgcgctgaacatcgtctcgatacgccccggataacgtttatcccagtcacgcaacatgtcagcaattacctgacgttgcaggttaggctgagaaccgcacaggttgcacggaataatcgggaacgcttttgcatcggcaaagcgctgaatatctttctcgcggcagtaggccagcggacgaatcacgatatgtttgccatcatcgctcatcagtttcggaggcatacctttcatcttgccaccgtagaacatatttaagaacagcgtttgcaggatatcgtcacgatggtgacccagcgcgatcttcgtcgcccccagttccgttgcggtgcgataaaggataccgcgacgaagacgagaacacagtgagcaagtggttttgccctccggaatcttctctttcacgataccgtaagtgttctcttcaacaatcttgtactcaacgcccagcgtttcaagatactcgggcagaacgtgttccgggaagcccggttgcttttgatcgaggttaacagccaccagcgaaaaattgattggcgcgctttgctgcaaattgcgcagaatctccagcatggtatagctgtctttacccccggagaggcaaaccatgatgcgatcgccttcttcaatcatattgaagtcagcaatggcttcgcccacgttacgacgcagacgtttttgtaatttgttcaggttgtattgttctttctttgtaatttgttgattttcttgcattatttcagttctctggtactaagtggggcatattgagggcaaactttgcaactacgataaccgcgcattcaacatggctacctgttcgtcgttcatgtcatcaatccacataccgtaaatttcatacaccatctgcgcagtttcatgccccatctggctggctataaatgccgggttcgctcctgccgtcaacagccagcaggcaaaagtatgtcgcgtatggtacggattacggcggcgaataccagcacgttttactgctgcattccatctcgctcccaaatagtcgtagtgaaatctgatgggaaagccttgcttagcatgctggtgttgcgctacccgtacaggcacaagatacatgctgcatttgatgccaatcggcgccaccaaaccaagccagaacagacgttgccagacgtatcggctggtcaatccataacgccaacgcgtccccaattgccagcgtaatattgcacaggcacacaggactgcaaacgcctggctgccgatcatgacggcggtctgtaaaaaagagagatgcaggttccacagattggtgcaaaacatcccgcataaaatgggaacgacaccacgccagccaaagataaacaagattgacagcattacgcacagtggcatccacgccagaaagatataattggaatggataacagcaagtggcgaaattaaacgggatagctgaataagtaccacggtgagcgtaaacgctagtgtgaatatcttgatattttttatcaggttatgctccacaaacatgagtacactactctcactgatcggggttttcaggcacacaaataataagtttattcgcatcgcgaagcaaacaggggccagcctgttgctgttttttcagtcagtgatgcattcaccacacggcactgccaggatatagactgtattacaaaagcggcaaaaggcagagacaaaaaacccccgctttgcagcgagggtttgaaatttggtggagctaagcgggatcgaaccgctgacctcttgcatgccatgcaagcgctctcccagctgagctatagccccacgagtcgtttacgtaccaaatttgctgggtgcaaaatttggtggagataagcgggatcgaaccgctgacctcttgcatgccatgcaagcgctctcccagctgagctatagccccacgagtcgtttacgtaccaaatttgctgggtgcaaaatttggtggagctaagcgggatcgaaccgctgacctcttgcatgccatgcaagcgctctcccagctgagctatagccccatcacgtaaagcttgtcgagttgacgggcggcatcatatgaattccgcccgaatgtgtcaacggcaaattgccacgtgtagtttcaatcgctgaaaaatcaggcaaatgaacaattttggaaaaccgctcgcattcagtagttattcatgtcacggtttcctgtaaagtggtgttataaaatgaactactaatagacccacatacattcagggaattgttatgttcaaggagaggatgacgccagatgaacttgccagactgaccggctatagccgccagaccattaataaatgggtacgcaaggaaggctggacaacgtcaccaaaaccaggcgtccagggtggcaaagctcgactggttcacgtcaatgaacaggttcgtgaatatattcgcaatgctgaacgtccagaaggtcagggagaagcgccagccctttctggtgatgcgccgcttgaagtgttgctggtgacactggcgaaagagatgacgccagttgaacaaaaacagtttacatccttgcttctgcgggaagggattatcggattgttacaacgcttagggattcgcgatagcaaataatatgaaaagattacgcaataaaatgaccaccgaagaactggctgaatgcctcggcgtggctaaacaaactgttaaccgttggatcagagaaaaaggctggaaaacggaaaaatttcccggcgtgaaaggcggtcgtgccagacttattctggtcgatacgcaagtttgcgagtttattcagaacacgccagccttccataacacaccgatgcttctggaagccgaagaaccccttgccgaatacgcaccgggtattcgcactcctgcttatcggcaaatcatcagcgcaatagacaacatgactcacagtgagcaagaaaaagttgcgcaatttttgtcacgcgaaggaattcgtaattttcttgctcgtctcgacatagatgaatcagcataaataaaaaacggcaggggtatctctcctgccgtttatcttttatgcgctaattactgctgattttcgcgttcagcaataaaagccagcgctttgttgatacgctcgatactgcgggtcttaccgattgcgtgaacggtaacatccagcgccggagactgccccgcaccggttacggcgacacgcagcggcataccaactttacccatacccacttccagctcatccgccgtcgcctgaatagcgtgatgaacgttttcagcggtccagtcagtaatcgcagtcagtttgtcacgaactacttccagcggctgacgcgctaccggacgcagatgttttttcgcggcgtcggcatcgaactcagcaaaatcttcgtagaaataacggcagctctgtgccatctctttcagcgtcttgcagcgttcgcccagcagtttcaccagatcagccagctgcgggccgttacgggtatcgatattttcctgctcaatgtgccactgtaagtgagtagcaacatactccggcggcaacgcgttaatgtagtgatggttcagccacagcagcttgtcggtgttgaacgcactggcagatttgctgacggcattcagagtgaagtatttaatcatctcttcacgagtgaagatttcctgatcgccgtgggaccagcccagacgcaccagatagttcagcagtgcttctggcagataaccatcatcacgatactgcattacgctgaccgccccgtgacgtttggacagttttttaccgtcatcgccgttgatcatagaaacgtgcgcgtaaaccggtaccggcgctttcagagccttaagaatgttaatctggcgcggtgtgttgttgatatggtcttcgccacggataacgtgggtgatttccatatcccagtcatcgacaaccacacagaagttataggttggggaaccatcggtacggcggataatcagatcatccagctcctggttgctgaactcgatcggaccacggatctgatcgtcaaaaacaacagaaccttcctgcgggttagcaaaacgtacgacacacggctcatcatcagcgtgatgctcatgactgtggcggcagcgaccgtcataacgcggcttctcacctttcgccatttgctcttcgcgcagcgcttccaggcgctctttagagcaatagcatttataagctgtgccctcttccagcatctgatcgatcaccgcgttgtagcgatcaaaacgtttggtctggtagtacggaccttcatcccactccaggctcagccagttcatgccatccataatggcttcgatagcttccggcgtggaacgctcaagatcggtgtcttcaatacgcagcacgaactcaccgccgtggttacgtgcaaaaagccaggagtaaagagcagtacgcgcgccgccaacgtgcagatagcctgttgggcttggcgcgaagcgagttttgattttcatgaaatggccttacgtttagaaagatgccgacaaccggcaaatcctggaaaaattgagtgggcgatattctatcactcccgcctgattcctcaatgtagttcgggttgcaaccttacgcattattgttttcgttgacaaattgcgcaacacggtctgttttgcgatcatcttgcttaaatttacgacgaacgaacaatttctttagaaaatgcgttgactcattttgaactctccctataatgcgactccacacagcgggggtgattagctcagctgggagagcacctcccttacaaggagggggtcggcggttcgatcccgtcatcacccaccaactcacttatgtagtctccgccgtgtagcaagaaattgagaagtgggtgattagctcagctgggagagcacctcccttacaaggagggggtcggcggttcgatcccgtcatcacccaccaatcagcgcaatagacaacatgactcacagtgagcaagaaaaagttgcgcaatttttgtcacgcgaaggaattcgtaattttcttgctcgtctcgacatagatgaatcagcataaataaaaaacggcaggggtatctctcctgccgtttatcttttatgcgctaattactgctgattttcgcgttcagcaataaaagccagcgctttgttgatacgctcgatactgcgggtcttaccgattgcgtgaacggtaacatccagcgccggagactgccccgcaccggttacggcgacacgcagcggcataccaactttacccatacccacttccagctcatccgccgtcgcctgaatagcgtgatgaacgttttcagcggtccagtcagtaatcgcagtcagtttgtcacgaactacttccagcggctgacgcgctaccggacgcagatgttttttcgcggcgtcggcatcgaactcagcaaaatcttcgtagaaataacggcagctctgtgccatctctttcagcgtcttgcagcgttcgcccagcagtttcaccagatcagccagctgcgggccgttacgggtatcgatattttcctgctcaatgtgccactgtaagtgagtagcaacatactccggcggcaacgcgttaatgtaatgctgccaacttactgatttagtgtatgatggtgtttttgaggtgctccagtggcttctgtttctatcagctgtccctcctgttcagctactgacggggtggtgcgtaacggcaaaagcaccgccggacatcagcgctatctctgctctcactgccgtaaaacatggcaactgcagttcacttacaccgcttctcaacccggtacgcaccagaaaatcattgatatggccatgaatggcgttggatgccgggcaacagcccgcattatgggcgttggcctcaacacgattttacgtcacttaaaaaactcaggccgcagtcggtaacctcgcgcatacagccgggcagtgacgtcatcgtctgcgcggaaatgggcgaacagtggggctatgtcggggctaaatcgcgccagcgctggctgttttacgcgtatgacaggctccggaagacggttgttgcgcacgtattcggtgaacgcacgatggcgacgctggggcgtcttatgagcctgctgtcaccctttgacgtggtgatatggatgacggatggctggccgctgtatgaatcccgcctgaagggaaagctgcacgtaatcagcaagcgatatacgcagcgaattgagcggcataacctgaatctgaggcagcacctggcacggctgggacggaagtcgctgtcgttctcaaaatcggtggagctgcatgacaaagtcatcgggcattatctgaacataaaacactatcaataagttggagtcattaccgacattgtcaagatgaacagcatgcattgtaacagtctgcagtttatgttctccgtggataattattcttatttcatggtgatttttgttatattttaaaatgcatatctcaccatttagtttttatatcacaaaaacatagtaatgcaatcatacacacctgcctctatcgtacagagaaaacgggcaattatttgtattattccttcataacgacttcagtatacaggatgaccgcaaccacgctccttctcctgcccgggcgaagtgcctggttcagacaattacattaactggctgaaattttcgacgcggtacaggcctccctgctttgaaaggtggcctggcgctgcaattttttacttttgtttttgtatccggaaaaacacatctgcaagaatcattattctcttgcctgaagctatccagcatcctcagatatttcgcactttatgagctggcatcagaaaaatgtgccagtaactttttattaatgacttcaaacagttcctgttcatcatgggtcagataatcccagatttctttcagatacatgctttgtgcaagagtgagcctctgaataaaaaacataccttcagatgtcagactgatttttttagcacggcgatcctccctgctatccgtcctttttacatatccggctttttctaaaaaatctgtaatgcgggtaatattagttctggtaaactgaagtttctggcttatctctgaaggtgacagacaatggttctccgctgcgaataatgtggtgagaaccatatatgctgagtgatttattccatacacccccagaaattcagatatattatcctgcattcttttatttgtgcgaatacagagctgcatcaacaaatgttcccgaaagggatatgcggggtctttgtttttttggtgtctgattattttttctaatgtgtctgtgttattcatttcattattctccatattactgaaacacactgtctgtgtacaagcgcgcatcagtcatccggtaaacatcgactttccactacaatttattcctacctgatttctgtatgacagagtagtcccgacaggcagacggataaattcccgcaggtaaaagaacataaatgctggctgctgacaagtctgtgaaaaaggattattgtagtggttcacaaaatcaggacaccggaataacctgtttccacttttcttcatgtaagcaaggcggtaaaccatcgttgttcgtgtgaggtcgataaacgttgtaggtaatgactccaacttattgatagtgttttatgttcagataatgcccgatgactttgtcatgcagctccaccgattttgagaacgacagcgacttccgtcccagccgtgccaggtgctgcctcagattcaggttatgccgctcaattcgctgcgtatatcgcttgctgattacgtgcagctttcccttcaggcgggattcatacagcggccagccatccgtcatccatatcaccacgtcaaagggtgacagcaggctcataagacgccccagcgtcgccatcgtgcgttcaccgaatacgtgcgcaacaaccgtcttccggagcctgtcatacgcgtaaaacagccagcgctggcgcgatttagccccgacatagccccactgttcgcccatttccgcgcagacgatgacgtcactgcccggctgtatgcgcgaggttaccgactgcggcctgagttttttaagtgacgtaaaatcgtgttgaggccaacgcccataatgcgggctgttgcccggcatccaacgccattcatggccatatcaatgattttctggtgcgtaccgggttgagaagcggtgtaagtgaactgcagttgccatgttttacggcagtgagagcagagatagcgctgatgtccggcggtgcttttgccgttacgcaccaccccgtcagtagctgaacaggagggacagctgatagaaacagaagccactggagcacctcaaaaacaccatcatacactaaatcagtaagttggcagcatcaccggttgcgactgcagaaaaagcaccctcagtgacttgggcattattggctgacgacttcttaacaatcgcagtataatgcagcacattatcaccatctttcagggtattagcatcaccttctgtgccatcgaaagaaacgtttttacctgcagcctgaactacaatcgcagtacctgtccccccgctggtatctaactcctcattatgaccagaaacccttggaccactaaaagccagcttcacagtccctttttttgctgccgagactcctccccccccttaaatgaagtgatatcacaattaaccaattcaatatctaaattcattggtttggatacgcctcctgcttgaaggaagctttttgaaagctgtccaaaatcaatagactgatcagctgatttctgagaaatgctgcatggagtctcatccgtggataatacggaaacgcactgcacaggactctgcggtttacgtcgccattcaatcccataagcttcaagtgatgtcttccctcagtgctgctaattcatcactgtcagatttatgaaccatattcgttacctgtatccgaaccactgaagcaccacagcagaaattcgggtcccctacactgattacagcgccccctctgctgcctattaactcaagcacctcccaacaacttacggaaacttaattctaatacagctgtaattcagttgtgtcgtggtcggccgcggttacttttttcgggaagtctgctacgcatcagaataataccgtgttctttctgatcctgtttagccaggtagctaagggcgtaacgtaaaccgttagactggccccctgaatctccagacaaccaatatcacttaaataagtgatagtcttaatactagtttttagactagtcattggagaacagatgattgatgtcttagggccggagaaacgcagacggcgtactacacaggaaaagatcgctatcgttcagcagagctttgaaccgggaatgacggtctcccttgttgcccggcaacatggtgtggcagccagccagttatttctctggcgtaagcaataccaggagggaagtcttactgctgtggctgccggagaacaggtcgttcctgcctctgaacttgctgccgccatgaagcagattaaagaactccagcgtctgctcggcaaaaaaacgatggaaaatgaactccttaaagaagccgttgaatatgggcgagcaaaaaagtggatagcgcacgcgcccttattgcccggggatggggagtaagcttcgtcagccgttgtctccgggtgtcgcgtgcgcagttgcacgtcattctcagacgagccgatgactggaaggacggccgccgcagccgtcacacggatgatacggatgtgcttcgccgtatacaccatgttatcggagagctacccacatatggttatcgtcgggtatgggcgctgcttcgcagacaaacagaacttgatggtatgcctgcgatcaatgccaaacgtatttaccggatcatgcgccagaatgcgctgttgcttgagcgaaaaaccgctgtaccgccatcgaaacgggcacataccggcagagtggctgtgaaagaaagtaatcagcgatggtgctctgacgggttcgagttccgctgtgataacggagaaaaactgcgggtcacgttcgcgctggactgctgtgaccgtgaggcactgcactgggcggtcactacgggcggcttcaacagtgaaacagtacaggacgtcatgctgggagcggtggaacgccgcttcggcaacgagcttccggcgtctccagtagagtggctgacggataatggttcatgctaccgggctaatgaaacacggcagtttgcccggatgttggggcttgaaccgaaaaacacggcggtgcggagtccggagagtaacggcatagcagagagcttcgtgaaaacgataaagcgtgactacataagtatcatacccaaaccagacgggttaacggcagcaaagaaccttgcagaggcgttcgagcattataacgaatggcatccgcatagtgcgttgggttatcgctcgccacgggaatatctgcggcagcgggcctgtaatgggttaagtgataacagatgtctggaaatataggggcaaatccaggaggtagcctgagtttaacggacactccttcctgaaatagaatggcatcagaaggagctaataatgagcagaaaaacccaacgttactctaaagagttcaaagccgaagctgtcagaacggttcttgaaaatcaactttcgatcagtgaaggcgcttcccgattatctcttcctgaaggcactttaggacaatgggttaccgccgccagaaaagggctcggtactcctggttcccgcacggtggctgaactggaatctgaaattctgcaactgcgtaaggcgttaaatgaagctcgccttgagcgagatatattaaaaaaagcaactgtagattcaattggtcaacgcaacagttatgtgaaaacatggggttgcggaggttttttgaatgagacgaacatttacagcagaggaaaaagcctctgtttttgaactatggaagaacggaacaggcttcagtgaaatagcgaatatcctgggttcaaaacccggaacgatcttcactatgttaagggatactggcggcataaaaccccatgagcgtaagcgggctgtagctcacctgacactgtctgagcgcgaggagatacgagctggtttgtcagccaaaatgagcattcgtgcgatagctactgcgctgaatcgcagtccttcgacgatctcacgtgaagttcagcgtaatcggggcagacgctattacaaagctgttgatgctaataaccgagccaacagaatggcgaaaaggccaaaaccgtgcttactggatcaaaatttaccattgcgaaagcttgttctggaaaagctggagatgaaatggtctccagagcaaatatcaggatggttaaggcgaacaaaaccacgtcaaaaaacgctgcgaatatcacctgagacaatttataaaacgctgtactttcgtagccgtgaagcgctacaccacctgaatatacagcatctgcgacggtcgcatagccttcgccatggcaggcgtcatacccgcaaaggcgaaagaggtacgattaacatagtgaacggaacaccaattcacgaacgttcccgaaatatcgataacagacgctctctgggacattgggagggcgatttagtctcaggtacaaaaaactctcatatagccacacttgtagaccgaaaatcacgttatacgatcatccttagactcaggggcaaagattctgtctcagtaaatcaggctcttaccgacaaattcctgagtttaccgtcagaactcagaaaatcactgacatgggacagaggaatggaactggccagacatctagaatttactgtcagcaccggcgttaaagtttacttctgcgatcctcagagtccttggcagcggggaacaaatgagaacacaaatgggctaattcggcagtactttcctaaaaagacatgtcttgcccaatatactcaacatgaactagatctggttgctgctcagctaaacaacagaccgagaaagacactgaagtgcaaaacaaaaactggccaccgagttagagttttttccagtatcgattttccgattcgtttggtggtaacccaccattatattcgtgcggtcttagtgcgctgtaatatccaacgatatagtccgttattgcgtgagctgcatcgttcaaaaataagattaatgagaaaatcactccttgaataccgtagagcgttacttatatgttcaaaaagcttaactcgttcgccatttttaaaataacgagattgaattgttagataacaaacaattttaatataagtatccaacataccaacttttctaagagaatctgcatatcccaataaataagaaaactcattgccagaattctgagctgatacattcttagatagttcaagtacattgtcgtattcgtttattcttttgtgaataaggttatcgttaccttttaaaggcgagtttttatgttgaagatcaactttctccttatgaattgataataaaaaatcaagagcaccaatatttgtccctaatttctttttacgttcaactaaatttatatattctgcgttcatacattcacttaatgataaataaaatgagaataaaactgcatttactaaatattataaatataaatctttaaaaacatcactaaaactcaacgaatgtcacagtgtaagctcacagagatattgcaattatctccggacaagcgagggaaatgctaagttgatgcaacgtatctgcggcggatatttgaggcattaccatgccaacatctatgtgatgaaacactttgttatacctgagattacaaaattaaggatgaaaaaatatacttctgggagaaacatgagatcaatacagttgcggaagtttttgctgtatccacacgaacgctgtattatggcccagaggcacctatttcgcgtagcaaagctccgctagtacatcgcacaaagcaatggcatctcgtaattctgtaagaaatacgtcgactgagaatagagcttcccaacctagaagaacagatttttgtttgcttgaagccgtggagtgaacagcaccgcctggtctgtccgagcatttcaaccatcggcaggatgttcacggccgcacacgataaaatgcgactgataccgatgtgactgcctccccaaggaaaaacactgttcataaaaaatacaatcctccaacccgcagatcaaaacgctatcgcccggtaaagagcagtgagctcgttggtatagatgctattgagctcagaatgggcgagctgcgctgttatgtcattaccatgatcgacgaacacagcaactacgctctggcacaggccgtgccgtcacttaactgtgatatcatcaaactcttcttttgccgtgcagaccggctattccctatcgatatcaaccagggcatcgcagataacgggaaagagttcccaggaaacttcgacaaagcaccgcaggaatccgctagcaagccctatggacctacccctttacgcctagaacgcacctctgaacgttttaagcgaacgccgaaagaacagttcattgaatttaaataaatagactctttaaagagctaaacatatttaatcagaaactagctgaaaacctagtactatactgcagtaaaagacagcatgaagtgctcgaattactgacaccagaagaaaatattttacgagagaacaaaatttgcaatatgtggcgaatctatacggtcacttgcaaaagtataaattggtattataatgcgtgatattatataaataaaataactaactattttaacgaaagcaaaacaccacaaagagaaaaataaaatttgcaatatatctcattagggttcacatttttaacagcccttgattttagctctcctatatttataaacaacaacaattaacttaaatggaagggtaatgaatccaaatatcgaattagcactggagataatagcctgccctaattgataagataaatgtttcttaactctttcagccttatcagcatcagcatataaatagagtggcacatcaacgccataactcttcttacgttttttttcaaaaacacactcacggataagtgcaaatggcatggtaataatccccttgagggatttagaatacgagactataatataaccaagtcgataacctaactcttgttttatctgctcagctgctccatatagcacaggtggaagtttctttttaatttcctgattttctataaaatagtgttccaactgctcttgcactatatgcaattgttttaaaatctgttctttttctgatattgcctgagtgagttttgattctttttcgcttatctcttcttcatatttatgcatgttttaaaatctgttctttttctgatattgcctgagtgagttttgattctttttcgcttatctcttcttcatatttatgcaattgttttaaaatctgttctttttctgatattgcctgagtgagttttgattctttttcgcttatctcttcttcatatttctgtatgtcatttatttttttttcaatatcatctggatatttttcttgtctcacaacatcgttgtgatttatttttgaaagtttaattacctcttccttttctttttttagctcattaatcctgttcaataataaaaattgtcttttcttaaatatagatttagtcaattcaatatctgcatccttcttttttgactcttgcaccaaatgagatacaatattgaagatagaatttctctcttcgactacctcccataatgcagcctcagccgaaacgttatctttcgatgtttctatataaggtaggtttgcataggcttgtaactcattataaagcttcagaacctcggttctttcttttattaattcagatactaagtactcactaacctttgtatcattaaatgtaatttcagtctcatttgcacttaaagaaaataaagttgtatatttttcaagcagggcaatttcatttgattttgtataatcattattctcaaccacatcaaacaatattgaatttttgtaatgcgcagacattagattatctatttttataatattactcaatggctttataatatttttcttattgctttgaaacgcctcaaaattaatcaacacacatcgttctttattctccaaaaaaaaatcaagcaatcttttattatatgcaatccagttatctacactattatttatatttaaagagagaggggcattatttactgaacgcattaaattatatttagggtgatcatatatcatgatgaattttatgcttttatctatatttttccaaaaatcaagaaaaaatattatagatggatctgcccacccccaaagtttgttatttagattgttcatcattagttcaagaaccatgctatcccacatggttgagacttgaacagctgagaattctctctcatctactacatcattaacttctggtgtttgataaaattgacataatgaagcggtgatatattctggggaaattttattacttgtagaataatttggtgagttcatgccaatttctttcaaaaaatgttcaactatctgatactttgagccaggatgtccgactagcactaatttattcatcatatttcctctttattatctacaagattactttattttaaacactgtcgtttatcgtaatggtgatattgcagacatatatttcaaatctgtaatgtaatttaggtggcgttatgtgataatactaaatgaaactatctatatctcaatagcacatctgatttatttggtatagccattcatcaataaacaatatcaatataactcagagcacctcctaataattgacatattgcgttaccaccttcttttagacaaaaatcttaattataaactctaccaaactaacgctgatatttttcaaaatcataaaacaaatggtttaaataagtatataacaaaatatcaacgtacaactatttaaaacaagtatttatactataaacttcagaaaccaacacaaaatacaggaatgtgaataaaaaagtaagtttttacccttccacattatacactaattcgaggttaagttttgaatatcctgcgattgcttgtgtttcttttatgatgtctaaaggccatttttttgtaaatgtgttccaaagtccttccattgaacctgatgagacctctcttagccagtttttttctctgggaacacatatcataccaatttcattctctaacatatagcgagaaaatctaacatcgacgaatcgttgagaaccatccatatattttaaagatggtaattgatctgccttaagaaaaacagtccctgtacctaattgatttacaactctcggtcgcaatagcccttgagtaaatgaaaatacttttcttttagactgatctccatcaaatgcatctatgtatatacagccatgaatcccaacaatgcaattgaatattgcaaaggaattataaaaattgagcattttttctacataatcgggagggtaaataatatcatcatctgtaagtacgatcatatcatttttagcgcaaggaaatataaatttgcccacatccttataatctttatctggaataactggatttaattttgaaaaaccatctaattcctcaggaatttcttcaaactcattcaggcaaagattaattttatctacttgagcatgtaaactttgtatagaatgcaccaactctttttttcgaggtgggtatgatgacatatttgcaacaatcatggggtaatattttaattaatattgcatgttaatgaaaactatcaacgtattgatagtcgtttatttataggaaatgcttaataaacagaacacattaagttgattagaatgactccgcacctcatggacgatatgtttaattaaaaataactactagggtgtacgtttgatatatttatcttcatctaaattattactcttaccatatcaaaccactctttgcataaacatttcctgtaactatctaaaaataaattggcagataattaattaaagaataacagcaacgtattacgagatcacgatcaaattcataattgcctagttcaaagtatactgtccatcctcctcatacactaaatacaatagagtttatataattatatagagtgtgattacaatctccggcaatgacactgttagtgcaacagtaatcaggcctccctcttagtattgcttacgctgaaagaataactggcagcctgccacaccatgttgtctggcaacgaggaagaccgccattttcggttcaaggctctgctgaaaaatagcgattttcctgtgtggcacgctgtctgcgtttctctgcttctaagacaccaattatctattctccaactactagtctaaaagactagtatcactactatcagttatttaaatgatattgattgcctagagattcagggagctagtctagttattcagagaacggtatcttaacaattttgttatgattttaggagatctggatttctattcatgatgcttggcgacaaaaataaatgaacaaaaagaacttatatcagccacagcaacataatttcttatgtcacttgtattctacctgtgtcctatatgcaattgttttaaaatctgttctttttctgatattgcctgagtgagttttgattctttttcgcttatctcttcttcatctttatgcaattgttttaaaatctgttctttttctgatattgcctgagtgagttttgattctttttcgcttatctcttcttcatatttctgtatgtcatttatttttttttcaatatcatctggatatttttcttgtctcacaacatcgttgtgatttatttttgaaagtttaattacctcttccttttctttttttagctcattaatcctgttcaataataaaaattgtcttttcttaaatatagatttagtcaattcaatatctgcatccttcttttttgactcttgcaccaaatgagatacaatattgaagatagaatttctctcttcgactacctcccataatgcagcctcagccgaaacgttatctttcgatgtttctatataaggtaggtttgcataggcttgtaactcattataaagcttcagaacctcggttctttcttttattaattcagatactaagtactcactaacctttgtatcattaaatgtaatttcagtctcatttgcacttaaagaaaataaagttgtatatttttcaagcagggcaatttcatttgattttgtataatcattattctcaaccacatcaaacaatattgaatttttgtaatgcgcagacattagattatctatttttataatattactcaatggctttataatatttttcttattgctttgaaacgcctcaaaattaatcaacacacatcgttctttattctccaaaaaaaaatcaagcaatcttttattatatgcaatccagttatctacactattatttatatttaaagagagaggggcattatttactgaacgcattaaattatatttagggtgatcatatatcatgatgaattttatgcttttatctatatttttccaaaaatcaagaaaaaatattatagatggatctgcccacccccaaagtttgttatttagattgttcatcattagttcaagaaccatgctatcccacatggttgagacttgaacagctgagaattctctctcatctactacatcattaacttctggtgtttgataaaattgacataatgaagcggtgatatattctggggaaattttattacttgtagaataatttggtgagttcatgccaatttctttcaaaaaatgttcaactatctgatactttgagccaggatgtccgactagcactaatttattcatcatatttcctctttattatctacaagattactttattttaaacactgtcgtttatcgtaatggtgatattgcagacatatatttcaaatctgtaatgtaatttaggtggcgttatgtgataatactaaatgaaactatctatatctcaatagcacatctgatttatttggtatagccattcatcaataaacaatatcaatataactcagagcacctcctaataattgacatattgcgttaccaccttcttttagacaaaaatcttaattataaactctaccaaactaacgctgatatttttcaaaatcataaaacaaatggtttaaataagtatataacaaaatatcaacgtacaactatttaaaacaagtatttatactataaacttcagaaaccaacacaaaatacaggaatgtgaataaaaaagtaagtttttacccttccacattatacactaattcgaggttaagttttgaatatcctgcgattgcttgtgtttcttttatgatgtctaaaggccatttttttgtaaatgtgttccaaagtccttccattgaacctgatgagacctctcttagccagtttttttctctgggaacacatatcataccaatttcattctctaacatatagcgagaaaatctaacatcgacgaatcgttgagaaccatccatatattttaaagatggtaattgatctgccttaagaaaaacagtccctgtacctaattgatttacaactctcggtcgcaatagcccttgagtaaatgaaaatacttttcttttagactgatctccatcaaatgcatctatgtatatacagccatgaatcccaacaatgcaattgaatattgcaaaggaattataaaaattgagcattttttctacataatcgggagggtaaataatatcatcatctgtaagtacgatcatatcatttttagcgcaaggaaatataaatttgcccacatccttataatctttatctggaataactggatttaattttgaaaaaccatctaattcctcaggaatttcttcaaactcattcaggcaaagattaattttatctacttgagcatgtaaactttgtatagaatgcaccaactctttttttcgaggtgggtatgatgacatatttgcaacaatcatggggtaatattttaattaatattgcatgttaatgaaaactatcaacgtattgatagtcgtttatttataggaaatgcttaataaacagaacacattaagttgattagaatgactccgcacctcatggacgatatgtttaattaaaaataactactagggtgtacgtttgatatatttatcttcatctaaattattactcttaccatatcaaaccactctttgcataaacatttcctgtaactatctaaaaataaattggcagataattaattaaagaataacagcaacgtattacgagatcacgatcaaattcataattgcctagttcaaagtatactgtccatcctcctcatacactaaatacaatagagtttatataattatatagagtgtgattacaatctccggcaatgacactgttagtgcaacagtaatcaggcctccctcttagtattgcttacgctgaaagaataactggcagcctgccacaccatgttgtctggcaacgaggaagaccgccattttcggttcaaggctctgctgaaaaatagcgattttcctgtgtggcacgctgtctgcgtttctctgcttctaagacaccaattatctattctccaactactagtctaaaagactagtatcactactatcagttatttaaatgatattgattgcctagagattcagggagctagtctagttattcagagaacggtatcttaacaattttgttatgattttaggagatctggatttctattcatgatgcttggcgacaaaaataaatgaacaaaaagaacttatatcagccacagcaacataatttcttatgtcacttgtattctacctgtgtcattaagtttatcgtttcaatttcataagatacatatgctatttgtcatattaattttattattaacaccaacgaatgacaagcagaacatataaatacctgaactaagagttaattatttaatataattatcattcaatatctaaagcttgatacattttatactcatctataccactttgaacattctcataataaccaataatatagctatttttaaaaacaatcctcaaggagtcagggagaactcatctcggggcaagtttcgtgcttagatgctttcagcacttatctcttccgcatttagctaccgggcagtgccattggcatgacaacccgaacaccagtgatgcgtccactccggtcctctcgtactaggagcagcccccctcagttctccagcgcccacggcagatagggaccgaactgtctcacgacgttctaaacccagctcgcgtaccactttaaatggcgaacagccatacccttgggacctacttcagccccaggatgtgatgagccgacatcgaggtgccaaacaccgccgtcgatatgaactcttgggcggtatcagcctgttatccccggagtaccttttatccgttgagcgatggcccttccattcagaaccaccggatcactatgacctgctttcgcacctgctcgcgccgtcacgctcgcagtcaagctggcttatgccattgcactaacctcctgatgtccgaccaggattagccaaccttcgtgctcctccgttactctttaggaggagaccgccccagtcaaactacccaccagacactgtccgcaacccggattacgggccaacgttagaacatcaaacattaaagggtggtatttcaaggtcggctccatgcagactggcgtccacacttcaaagcctcccacctatcctacacatcaaggctcaatgttcagtgtcaagctatagtaaaggttcacggggtctttccgtcttgccgcgggtacactgcatcttcacagcgagttcaatttcactgagtctcgggtggagacagcctggccatcattacgccattcgtgcaggtcggaacttacccgacaaggaatttcgctaccttaggaccgttatagttacggccgccgtttaccggggcttcgatcaagagcttcgcgttaccgctaaccccatcaattaaccttccggcaccgggcaggcgtcacaccgtatacgtccactttcgtgtttgcacagtgctgtgtttttaataaacagttgcagccagctggtatcttcgactgatttcagctccacgagcaagtcgcttcacctacatatcagcgtgccttctcccgaagttacggcaccattttgcctagttccttcacccgagttctctcaagcgccttggtattctctacctgaccacctgtgtcggtttggggtacgatttgatgttacctgatgcttagaggcttttcctggaagcagggcatttgtcgcttcagcaccgtagtgcctcgtcatcacgcctcagccttggttttccggatttgcctggaaaaccagcctacacgcttaaaccgggacaaccgtcgcccggccaacatagccttctccgtccccccttcgcagtaacaccaagtacaggaatattaacctgtttcccatcgactacgcctttcggcctcgccttaggggtcgactcaccctgccccgattaacgttggacaggaacccttggtcttccggcgagcgggcttttcacccgctttatcgttacttatgtcagcattcgcacttctgatacctccagcaaccctcacaggccaccttcacaggcttacagaacgctcccctacccaacaacacatagtgtcgctgccgcagcttcggtgcatggtttagccccgttacatcttccgcgcaggccgactcgaccagtgagctattacgctttctttaaatgatggctgcttctaagccaacatcctggctgtctgggccttcccacatcgtttcccacttaaccatgactttgggaccttagctggcggtctgggttgtttccctcttcacgacggacgttagcacccgccgtgtgtctcccgtgataacattctccggtattcgcagtttgcatcgggttggtaagtcgggatgacccccttgccgaaacagtgctctacccccggagatgaattcacgaggcgctacctaaatagctttcggggagaaccagctatctcccggtttgattggcctttcacccccagccacaagtcatccgctaatttttcaacattagtcggttcggtcctccagttagtgttacccaaccttcaacctgcccatggctagatcaccgggtttcgggtctataccctgcaacttaacgcccagttaagactcggtttcccttcggctcccctattcggttaaccttgctacagaatataagtcgctgacccattatacaaaaggtacgcagtcaccccattaagaggctcccactgcttgtacgtacacggtttcaggttctttttcactcccctcgccggggttcttttcgcctttccctcacggtactggttcactatcggtcagtcaggagtatttagccttggaggatggtccccccatattcagacaggataccacgtgtcccgccctactcatcgagctcacaatatgtgcatttttgtgtacggggctgtcaccctgtatcgcacgcctttccagacgcttccactaacacacacactgattcaggctctgggctcctccccgttcgctcgccgctactgggggaatctcggttgatttcttttcctcggggtacttagatgtttcagttcccccggttcgcctcattaacctatggattcagttaatgatagtgtgtcgaaacacactgggtttccccattcggaaatcgccggttataacggttcatatcacctcaccgacgcttatcgcagattagcacgtccttcatcgcctctgactgccagggcatccaccgtgtacgcttagtcgcttaacctcacaacccgaagatgtttcttgcgattcatcatcgtgttgcgaaaatttgagagactcacgaacaactctcgttgttcagtgtttcaattttcagcttgatccagatttttaaagagcaaaacttcgcagtgaacctttgcaggtacactctgaagtattttttatttaatcactacagagatggtggagctatgcgggatcgaaccgcagacctcctgcgtgcaaagcaggcgctctcccagctgagctatagccccataacatgtagttaaaacctcttcaaatttgcggtgcaaatttggtaggcctgagtggacttgaaccaccgacctcacccttatcaggggtgcgctctaaccacctgagctacaagcctgtagaggttttactgctcattttcatcagacaatctgtgtgagcactgcaaagtacgcttctttaaggtaaggaggtgatccaaccgcaggttcccctacggttaccttgttacgacttcaccccagtcatgaatcacaaagtggtaagcgccctcccgaaggttaagctacctacttcttttgcaacccactcccatggtgtgacgggcggtgtgtacaaggcccgggaacgtattcaccgtggcattctgatccacgattactagcgattccgacttcatggagtcgagttgcagactccaatccggactacgacgcactttatgaggtccgcttgctctcgcgaggtcgcttctctttgtatgcgccattgtagcacgtgtgtagccctggtcgtaagggccatgatgacttgacgtcatccccaccttcctccagtttatcactggcagtctcctttgagttcccggccggaccgctggcaacaaaggataagggttgcgctcgttgcgggacttaacccaacatttcacaacacgagctgacgacagccatgcagcacctgtctcacggttcccgaaggcacattctcatctctgaaaacttccgtggatgtcaagaccaggtaaggttcttcgcgttgcatcgaattaaaccacatgctccaccgcttgtgcgggcccccgtcaattcatttgagttttaaccttgcggccgtactccccaggcggtcgacttaacgcgttagctccggaagccacgcctcaagggcacaacctccaagtcgacatcgtttacggcgtggactaccagggtatctaatcctgtttgctccccacgctttcgcacctgagcgtcagtcttcgtccagggggccgccttcgccaccggtattcctccagatctctacgcatttcaccgctacacctggaattctacccccctctacgagactcaagcttgccagtatcagatgcagctcccaggttgagcccggggatttcacatctgacttaacaaaccgcctgcgtgcgctttacgcccagtaattccgattaacgcttgcaccctccgtattaccgcggctgctggcacggagttagccggtgcttcttctgcgggtaacgtcaatgagcaaaggtattaactttactcccttcctccccgctgaaagtactttacaacccgaaggccttcttcatacacgcggcatggctgcatcaggcttgcgcccattgtgcaatattccccactgctgcctcccgtaggagtctggaccgtgtctcagttccagtgtggctggtcatcctctcagaccagctagggatcgtcgcctaggtgagcctttaccccacctactagctaatcccatctgggcacatccgatggcaagaggcccgaaggtccccctctttggtcttgcgacgttatgcggtattagctaccgtttccagtagttatccccctccatcaggcagtttcccagacattactcacccgtccgccactcgtcagcaaagcagcaagctgcttcctgttaccgttcgacttgcatgtgttaggcctgccgccagcgttcaatctgagccatgatcaaactcttcaatttaaaagtttgatgctcaaagaattaaacttcgtaatgaattacgtgttcactcctgagacttggtattcatttttcgtcttgcgacgtcaagaatccgtatcttcgagtgcccacacagattgtctgataaattgttaaagagcagttgcgacgcggctttcagctcactgtcgcgaggtggcgtatattacgctttcctctctcagagtcaaccctgaatttcaggatttttctctttgttgttacgactatcttgtgactcccctattcggttaaccttgctacagaatataagtcgctgacccattatacaaaaggtacgcagtcaccccattaagaggctcccactgcttgtacgtacacggtttcaggttctttttcactcccctcgccggggttcttttcgcctttccctcacggtactggttcactatcggtcagtcaggagtatttagccttggaggatggtccccccatattcagacaggataccacgtgtcccgccctactcatcgagctcacaatatgtgcatttttgtgtacggggctgtcaccctgtatcgcacgcctttccagacgcttccactaacacacacactgattcaggctctgggctcctccccgttcgctcgccgctactgggggaatctcggttgatttcttttcctcggggtacttagatgtttcagttcccccggttcgcctcattaacctatggattcagttaatgatagtgtgtcgaaacacactgggtttccccattcggaaatcgccggttataacggttcatatcacctcaccgacgcttatcgcagattagcacgtccttcatcgcctctgactgccagggcatccaccgtgtacgcttagtcgcttaacctcacaacccgaagatgtttcttgcgattcatcatcgtgttgcgaaaatttgagagactcacgaacaactctcgttgttcagtgtttcaattttcagcttgatccagatttttaaagagcaaaacttcgcagtgaacctttgcaggtacactctgaagtattttttatttaatcactacagagatggtggagctatgcgggatcgaaccgcagacctcctgcgtgcaaagcaggcgctctcccagctgagctatagccccataacatgtagttaaaacctcttcaaatttgcggtgcaaatttggtaggcctgagtggacttgaaccaccgacctcacccttatcaggggtgcgctctaaccacctgagctacaagcctgtagaggttttactgctcattttcatcagacaatctgtgtgagcactgcaaagtacgcttctttaaggtaaggaggtgatccaaccgcaggttcccctacggttaccttgttacgacttcaccccagtcatgaatcacaaagtggtaagcgccctcccgaaggttaagctacctacttcttttgcaacccactcccatggtgtgacgggcggtgtgtacaaggcccgggaacgtattcaccgtggcattctgatccacgattactagcgattccgacttcatggagtcgagttgcagactccaatccggactacgacgcactttatgaggtccgcttgctctcgcgaggtcgcttctctttgtatgcgccattgtagcacgtgtgtagccctggtcgtaagggccatgatgacttgacgtcatccccaccttcctccagtttatcactggcagtctcctttgagttcccggccggaccgctggcaacaaaggataagggttgcgctcgttgcgggacttaacccaacatttcacaacacgagctgacgacagccatgcagcacctgtctcacggttcccgaaggcacattctcatctctgaaaacttccgtggatgtcaagaccaggtaaggttcttcgcgttgcatcgaattaaaccacatgctccaccgcttgtgcgggcccccgtcaattcatttgagttttaaccttgcggccgtactccccaggcggtcgacttaacgcgttagctccggaagccacgcctcaagggcacaacctccaagtcgacatcgtttacggcgtggactaccagggtatctaatcctgtttgctccccacgctttcgcacctgagcgtcagtcttcgtccagggggccgccttcgccaccggtattcctccagatctctacgcatttcaccgctacacctggaattctacccccctctacgagactcaagcttgccagtatcagatgcagttcccaggttgagcccggggatttcacatctgacttaacaaaccgcctgcgtgcgctttacgcccagtaattccgattaacgcttgcaccctccgtattaccgcggctgctggcacggagttagccggtgcttcttctgcgggtaacgtcaatgagcaaaggtattaactttactcccttcctccccgctgaaagtactttacaacccgaaggccttcttcatacacgcggcatggctgcatcaggcttgcgcccattgtgcaatattccccactgctgcctcccgtaggagtctggaccgtgtctcagttccagtgtggctggtcatcctctcagaccagctagggatcgtcgcctaggtgagcctttaccccacctactagctaatcccatctgggcacatccgatggcaagaggcccgaaggtccccctctttggtcttgcgacgttatgcggtattagctaccgtttccagtagttatccccctccatcaggcagtttcccagacattactcacccgtccgccactcgtcagcaaatcagcaagctgattcctgttaccgttcgacttgcatgtgttaggcctgccgccagcgttcaatctgagccatgatcaaactcttcaatttaaaagtttgatgctcaaagaattaaacttcgtaatgaattacgtgttcactcctgagacttggtattcatttttcgtcttgcgacgtcaagaatccgtatcttcgagtgcccacacagattgtctgataaattgttaaagagcagttgcgacgcggctttcagctcactgtcgcgaggtggcgtatattacgctttcctctttcagagtcaaccctgaatttcaggatttttctcttcaaccgaaccggctgtttgtgtgaagtgattcacatccgccgtgtcgatggaggcgcattatagggagtcgtttcaggaagacaagcggaaaaatgcatttttatttcaaccgctcatcttttaatcatcacgccggtttttgctgcttttttatcgcttgcggcaggtctgccagactatttaacacccaatccgccgcgttttctgcttcaggcgtaataggtttacccgtacgcaccagcactttcgttcccacgctcgccgcagccgctgcctgcatatcttctaatttatcgcccaccatataagaagcggccatatcaatatgcaaataatcgcgtgctgacaaaaacatccccggatgtggtttgcggcagtcgcagacctggcgaaactcttcaacactaccctgcggatgatgcgggcaataatagatgccatccagatcgacatcgcggtccgcaagcgaccagtccatccactcggtcagcgtttcaaactgtgcttcagtaaatttaccgcgagcaatgccagactggttggttactaccaccagcgcaaagcccattttttttagctcgcgcatggcgtcaataacaccgtcgataaattcaaagttgtcgatctcatggacatagccgtgatcaacattaatggtgccatcacggtcaagaaaaattgcgggtacgctcttcgccaccttttatagctccttaataaggcatgtgacgctagtatcgcatgtttcgacctgcaagaaagtgctcttcgcataaacctgattgatttagacgtctggatgccttaacatccatttcattgacggcgttgcccgttccaggcattcgaaatgccacgactaacttaatgacgataataaataatcaatgataaaactttcgaatatcaccaaagtgttccaccagggcacccgcaccatccaggcgttgaacaacgtcagcctgcatgtgccagctggacaaatttatggcgttatcggtgcctcaggcgcgggtaagagtacgcttatacgttgtgtaaacctgctggagcgcccaaccgagggtagcgtgctggtcgatggccaggaactgaccacgctgtcagaatccgagttgaccaaagctcgtcgccagattggtatgattttccagcattttaacctgctctcttcgcgtactgtttttggcaacgtggctctgccgctggagctggacaacacaccgaaagacgagatcaaacgtcgcgtgacggaattgctgtcattggttggtcttggcgataagcatgatagctacccgtcgaatctttccggtgggcagaaacaacgtgtggcgattgcccgtgcattagccagcaatcccaaagtattgctgtgtgatgaagccaccagcgcgctggacccggcaacgacacgttctattctcgaactgctgaaagacatcaaccgccgtctgggtttgacgattctgttgatcactcacgaaatggacgttgtgaagcgcatttgtgattgcgtggcgatatgggtcttcccctgttgtggtgggtggtacataattgagtgattttcaaacaccacacagtacctttatggtgtctctttttacatgagagggaattcttatgagtgtgccgcaaacaaaagctgaactgcttttagctattgataaaaattttagtaaattaattagttacctcaacacaatcccaccagaaattacttcagataaatcaatggacggacacgccaaaggaacggagatgagtgttcgtgatctcgtttcgtatctgcttggatggaatgctcttgttgtaaagtggatcgcttctgatgctaaaggtctgcctgtcgattttccggaaactggctataaatggaatcagcttggccttcttgctcaaaaattttactcagattacagtgagttaagttatgagttgttagtagctgaacttcagactgtaaaaaatgagattgtgaaccttattaatgatcgtaccgatgatattttgtatggaagaccatggtacacaaaatggacgatggggagaatgatctcatttaacacatcttcgccttacgccaacgctaatggaagattaagaaagtgggcaaaaaataataatatcagtttaaagtaagcttcagaatgaaattatatggacgaaaaatccctctatgcccatatccttaacctgactgcaccatggcaggttaaatcccttaccctcgatgaaaatgcaggttccgttactgttacagtcggaattgctgaaaatactcagttaacctgtccgacctgcaggaaatcctgttctgttcacgatcaccgacatcgtaaatggcgccaccttgatacctgccagttcatgacattagtagaagccgatgttccccgcgttatgtgcccggagcatggctgccagactctgcctgtaccgtgggcaggttccggcagtcggtacactctgctgttcgaatcgttcgtgctctcatggcttaaaatcagcaccgttgatgcggtcagaaaacaacttaaacttagctggaatgccgttgacggcatcatgacccgcgcggttaagcgaggcctgtcgcggattaaaaagcctttatcagtgcgtcatatgaatgtagacgaagtcgcctttaaaaaagggcataggtatataaccgtggtatctgatcgcgacgggcgggcactggcattaaccgatgatcgtggcacagagagtcttgccagctatctccgttcgcttactgacagtcagttgttggccatcaaaacactgtcgatggacatgaatgcgggctatataagagcagcgcgtatccatttacccaatgcggtcgagaaaatcgccttcgatcgcttccatgtggcgaaacagtgagttaagttatgagttgttagtagctgaacttcagactgtaaaaaatgagattgtgaaccttattaatgatcgtaccgatgatattttgtatggaagaccatggtacacaaaatggacgatggggagaatgatctcatttaacacatcttcgccttacgccaacgctaatggaagattaagaaagtgggcaaaaaataataatatcagtttaaagtaagcttcagaatgaaattatatggacgaaaaatccctctatgcccatatccttaacctgactgcaccatggcaggttaaatcccttaccctcgatgaaaatgcaggttccgttactgttacagtcggaattgctgaaaatactcagttaacctgtccgacctgcaggaaatcctgttctgttcacgatcaccgacatcgtaaatggcgccaccttgatacctgccagttcatgacattagtagaagccgatgttccccgcgttatgtgcccggagcatggctgccagactctgcctgtaccgtgggcaggttccggcagtcggtacactctgctgttcgaatcgttcgtgctctcatggcttaaaatcagcaccgttgatgcggtcagaaaacaacttaaacttagctggaatgccgttgacggcatcatgacccgcgcggttaagcgaggcctgtcgcggattaaaaagcctttatcagtgcgtcatatgaatgtagacgaagtcgcctttaaaaaagggcataggtatataaccgtggtatctgatcgcgacgggcgggcactggcattaaccgatgatcgtggcacagagagtcttgccagctatctccgttcgcttactgacagtcagttgttggccatcaaaacactgtcgatggacatgaatgcgggctatataagagcagcgcgtatccatttacccaatgcggtcgagaaaatcgccttcgatcgcttccatgtggcgaagcaactgggcgaagtggttgataaaacccgccagaatgaacatccgcacctccctgttgaaagtcgtcgtcaggccaaaggtacccgcttcctgtggcagtacagcgacaaatggatgactgagtcccggcaggaaaagctgatgtggttgcgggaacagatgcaacagacaagccagtgctggacactgaaagagctggcaaaaaatatctgggatcgcccctggagcacagaacgcaggaatgactggttgcagtggatatcgctggcgtctgaatgtgatgtgccgatgatgaaaaacgcagcgaaaaccattaaaaaacggttatacggaatactgaatgcaatgcgtcatcgcgtctcgaatggaaatgcggaggcgctgaacagcaagatcagactgctgaggataaaggccaggggataccgaaaccgggaacgctttaaactgggagttatgttccactatgggaaactgaatatggcgtactgagtcttcccaccatgatcggggaagacccatatcagattatccagtgactgcgccagacacgggccttcgttataagctggtataatggcgtcaatacagcctttcttttgacagggtttacgtcttagcgtacttaaaaaccatagcaacattgctatggtcatgaagataaataacaaagttttcatttctattactccgttacaacaccatcttatggacaacaaaaccttcacacatagaatgactaacctgttgtcctcggaatttggcttgagcaattatgtattctggctgtatgtatcttcgatggatctggcttttatgcttttgtaatgctaatatttttttattaaaatggacctcatctacagattcaaaaacttgaggtaaaaatgacagacatgtacttggtgtttcgtatcctagtatttgaggaatataacgacaggcaaccattgatgcctgataaacagcaatgtgatcctgatgcctgtcagtattattcatggtgtaaactcgagtaatttccacatcctggggcgtttcattctcaattatgtattccagagatgatatcatctcttttatttgcaaatataatctggtatcttcaaaatttagagggattagtttattgcatcctaacatatttaatgcttcttgtgattccttgtgacgatcaatatactctgcgccacagcaaccaggtgtcatgacaacagatataatatatactttttcattagaataatatgaaagagatgcaccacatcctaattctatatcatcaggatgggcaccaattgctaaaatgccggttctttttcccgaagatgttgtagaattcaacatgtaatctatccttttagatatgccatatgaatccccatcataaattatcactatcataaaaattaatcttattaaacataaagaaagccttaggttgagtctggaggcgctgcgtagcgctttcactccgcaccaactgacagcgatgaaaaatgggctgttggatttagtcactgcattggatcggcaacctgacgctcgtctaggcgatctcgaagtctatcctgcgccgcacgtcgcattggcatgtggctcactcaaaccctcatttacttcccgatttgcagcgcaagttgtggagcatggtgatcgcacagcactaattgataatgaacagtctttgacttatcggcagttggatgacgctgttgagcgggttgcgcgttatctgcgccaacaggggatcggacgcggtcaagtggttgggattatcgctgagcatagcgctcaaacggtgatggttatttatggtattttgcgctgcggcgcggcatttctgccgctaaatcccgcgttgccaacgacccgcctttacgccatgtgtcgtaaagcgcaggtagcgcatatcctttacgatccggcgatgcatgaattgacgcaggcgctggcgtttcccgcgtccagcttgctccaggccttagccacttcggcgcttgctagagaaccttggccagctattgaaccgcaggatctggcatatgtgctgtttacctccggatcgaccggcgagcctaagggcgtgcaagtctctcatggcaatctggctaactatctccatttcgccgccgaacgttactttacagcgcaggaccgggctgcgctctactcttcgctgtccttcgatttgaccatcactacgctgttcgcccccttatgtgtgggcgctagcatcagcgtttgtcggcacgccgagagcgaaacattgctgcgcatggccgtggttgatcagcccaacacagtgatcaaactgacgcctgcacacctgcggttgttgtgtgcggctggcataagcagtgagcagattcgtaccttggtggttggcggggaggatttcaagcgggatctggcgcgtaaggcggctgctctctttcctcaggccgtgatctataacgaatatgggccgacagaggccaccgttggttgcatgatctatcgctacaccgggcaagaaacgctgccttcattgcccatcggtatggcgatcgacggttgccaggtagcaatttgctccccttggggctgtccggtaccggaaggcgaaactggtgaattggtgatttatggcgcgtcagtgacgcagggctatatcgatgcgccgcaacaaacggccgccgcctaccttaaagataccaatggggtgatgattggctatcgcagcggtgatattggctacgccatcgctcctaatacgctggtttatcagggacgtaaagacgatcaggtcaaaattaatggctatcgtattgagctgtgcgaaatcgaacaagcgttgttgagcgcacctcaggtagaaagtgcggcggtggcggtgattgatgatgtgcaggggcagcacagcgggttgctagcctgcgtgacaccgtcatctgttgatgtagctaccgtaatgcaacatctgcgtcagcaattacccacctacatgcaacccaagcagtgctgtgctatcgcccaactgccgctgtcgcacaatggcaaggtggacgtgcgtcagatggtcgcaacggtccgaaacaccgcgcctgcatcgggtagcgagcggctgggagatgcggcgataaggcattcagttcgggtatgtgtggaaggggcgctggagcaaactgagtttgatgataacgaaaatctttatgtcttggggttggactccatcaagagtatccagattgcagcgcagctcaggcaccacggctggacgatgtcagcggtgcaggtgatggagtgtggaacagtgaacgccatctgtgagtttctcgctagtcatacaacggtgtcacagctcgcgcagtatgctcataacacccgtatcgatctacccgcattgcgttggtttacgcagttggcgttgccagtgcccaatgtttataaccatgtcattgtgctgaaagtgttgccgggcgcaggcgtagccgataaccgcgacaggttcgcagtccgggtagtgttgaacgatcgatgcatcaatggaatctgctgttggcgcagaagagaagcgcaagttatccataatcggtcccatttcctaaggttcataaagtcaatggaacgccatgcgttcgcgatggcgttccggggaaaatcagtttgcttcgcgctatatccgccgctgacgacggcgaacagggcgagagcgtttggttttctccaccgtggcgacactggtcagataagcggccagggctgcaggagaagggtgggtaaagaggtcaagtaacgtcagagtcgaaaattcgtgacgttgtaacaaaacgtgcagttgcaccagattcagcgacgttgcgcccgcctcaaagaagttttgtgcgggcgtgacagactcgccaaccacctcgcggaaggcgtcgcaaatcaggctgacggtgctctcgtccgccgcaatgtgtgactgagagtgctcagggcatacgcgcgatgtgcgctctgtaccttgctccgcctgcttaacgggaggcaccagcgcggcgagtggcaaatgccagctgttttcatcctcggtcattcggtttagcaaggtgcaatactgctcaaactgacgttccacctgcccggcaggaaacagcgcggcgacaaaatcccagttaaagcgcagttcgccttcggattcataaacctggtgatcgagccagacctgcggcgtctgggagatgccccagaccggtttgagcagattacgccgggcgaggaagttatcctgctcaaagcccagcgcgctggtaaagacgacgggcatcggaacggcaggcacgttttgccgttgcgccagttgacgcatcacgcggatggctgacacatcgcggtggttgaggttctggctcagccgctgctgtagtgactgcgcgctgtgcagccagctttcgccgggatgccagctcagcagcatcagcgaggtgaaatcgcccagaatctggttgatttgcgggtgcagcggtcgcctgtcgaaaagcgtaaggttaagcgtgaactcaggctgtgcactccatgcagagagaaccgttgaccacaccgacaacagtacggccgacggggtgagatgggcgtcagccgcccgttttttcagccgatgccagcgcgtgctgtccagcgcgccgttcaggcgggcgaagcgcggtgtttcgacgtcctgaggcatgcaacgtagcggcaatgcaggagccggaggaatatcatcaagttgcgcctgccaccatgccagagaatctgcgttaagcgactggatcgcgggttgttgcaggtaatccctgtaggtgacgggtagcgagagaggtaagggatgaaaatcagtgaatttctacatctggcgttaccagaggaacaatggctaccgacgatttctggcgttttacgccagttcgtagaagaagagtgttatgtctatgagcgtcaaccctgttggtatttaggcaaagggtgccaggcacggctgcacattaatgccgacggaacgcaggcgacatttattgatgatgccggggagcaaaaatgggcggtggattccattgccgactgcgcgcgtcgttttatggcgcatcctcaggtgaaaggacgtcgggtatatggacaggttgggttcaactttgcggcgcatgcgcgggggattgcctttaacgccggggagtggccgctgctgacgttaaccgttccccgtgaagaacttatttttgaaaagggaaatgtcaccgtttatgcggactccgccgacgggtgccgacgtttgtgcgagtgggtaaaagaggccggtacaacgacgcagaacgcaccactggcggtggataccgccctcaatggtgaggcatataaacaacaggttgcgcgcgccgttgcggagatccgccgtggcgagtatgtcaaagtgattgtctcgcgcgccattcccctgccatcgcggattgatatgcccgccacgctgttatacgggcggcaggcaaacacgcctgtgcgctcgtttatgttccgtcaggaaggacgcgaagcgctgggctttagcccggaactggtgatgtcagtgacgggcaataaagtggtcactgaaccgcttgcgggcacccgcgatcgcatgggaaacccggagcataataaggcgaaagaggcagaactgctgcacgacagtaaagaggtgcttgagcatatcctttctgtcaaagaagctattgctgaactggaggccgtttgccagccgggcagcgtggtggttgaagatttaatgtcggttcgccagcgcggcagcgttcagcatctggggtctggcgtgagcggtcagcttgcggaaaacaaggatgcctgggatgcgtttaccgtgctgtttccgtcgattaccgcctcaggtatccctaaaaatgctgctctgaacgcgattatgcaaattgagaagacgccgcgagagctttattccggcgcaatcctgctgctggacgatacgcgctttgatgcggcgctagttctgcgttccgtatttcaggatagccagcgctgctggatacaggcgggggcgggaatcatcgcgcaatctacgccggaacgcgaactgacagaaacccgggagaaattagcgagcattgcgccctatttaatggtgtaggagtaactgttttctaacctcacaaccagattgtccaaagacaattgagtcgctctttgattcctctgtgactctattgtcttcttttgggataaaataggtgtttttcgtcatgaagttgataaaagtctatatagaaccacctcctgtggaggtggtggtaatttgccagagtgtgggattcgttagtatactatgggataaacttatttttaccaattgtataaggcggtgcataagattctcggcatgcttccagataatccgaccaccactgcatcatcgctttgcgggcttccaggtgctctgccttatgaatataagccatgcgcacggtattgcgctcctgatgactcatctggcgttctactgcgtcctttgcccataaacccgattccatcagcgcactgcatgccattgcccggaagccgtgaccgcagatatcctttttcgtgtcgtaacccatcacccgcagtgccttattgaccgtgttttcacacattggcttatacgggttatggtcgccggggaagatcagttcattattaccggtgatatccttaatctgtttcagaatggcgatggactgttctgagagggggacgatatgcggcattcgcatttttgccccgcggccggaataacgcacgccaataatgggttctcgcgtcgcgggtatcgtccagactcggtttgtgaaatcaatctctgaccagcgggcgaaacgcagttcactggagcgaatgaacacatgcagcatcagcagaacggcatgccgggtcagttcacggccctgatgatatgccccaatacgttcaagcagttcaggcagccgctccagcggcggggcaggatagtgccgtctgacaggaggtgtggtcacgccgccaaggtttgctgcagggttcgtatcgattaactcctgatggaccgcatggcgcattatgttactcaggtgctgccgtgtgcgggacgcaacctccagcagacctttttcctcgatccctttcagcaggtcaatgaaatgacggggtttaagttctgatacaggtaagttcccgatgaccggaaagatgtgattgttcagactggcacgcagacggtcggcggtgttctgcgaccatcaactctcgttgttcagtgtttcaattttcagcttgatccagatttttaaagagcaaaacttcgcagtgaacctttgcaggtacactctgaagtattttttatttaatcactacagagatggtggagctatgcgggatcgaaccgcagacctcctgcgtgcaaagcaggcgctctcccagctgagctatagccccataacatgtagttaaaacctcttcaaatttgcggtgcaaatttggtaggcctgagtggacttgaaccaccgacctcacccttatcaggggtgcgctctaaccacctgagctacaagcctgtagaggttttactgctcattttcatcagacaatctgtgtgagcactgcaaagtacgcttctttaaggtaaggaggtgatccaaccgcaggttcccctacggttaccttgttacgacttcaccccagtcatgaatcacaaagtggtaagcgccctcccgaaggttaagctacctacttcttttgcaacccactcccatggtgtgacgggcggtgtgtacaaggcccgggaacgtattcaccgtggcattctgatccacgattactagcgattccgacttcatggagtcgagttgcagactccaatccggactacgacgcactttatgaggtccgcttgctctcgcgaggtcgcttctctttgtatgcgccattgtagcacgtgtgtagccctggtcgtaagggccatgatgacttgacgtcatccccaccttcctccagtttatcactggcagtctcctttgagttcccggccggaccgctggcaacaaaggataagggttgcgctcgttgcgggacttaacccaacatttcacaacacgagctgacgacagccatgcagcacctgtctcacggttcccgaaggcacattctcatctctgaaaacttccgtggatgtcaagaccaggtaaggttcttcgcgttgcatcgaattaaaccacatgctccaccgcttgtgcgggcccccgtcaattcatttgagttttaaccttgcggccgtactccccaggcggtcgacttaacgcgttagctccggaagccacgcctcaagggcacaacctccaagtcgacatcgtttacggcgtggactaccagggtatctaatcctgtttgctccccacgctttcgcacctgagcgtcagtcttcgtccagggggccgccttcgccaccggtattcctccagatctctacgcatttcaccgctacacctggaattctacccccctctacgagactcaagcttgccagtatcagatgcagttcccaggttgagcccggggatttcacatctgacttaacaaaccgcctgcgtgcgctttacgcccagtaattccgattaacgcttgcaccctccgtattaccgcggctgctggcacggagttagccggtgcttcttctgcgggtaacgtcaatgagcaaaggtattaactttactcccttcctccccgctgaaagtactttacaacccgaaggccttcttcatacacgcggcatggctgcatcaggcttgcgcccattgtgcaatattccccactgctgcctcccgtaggagtctggaccgtgtctcagttccagtgtggctggtcatcctggctgtacagcagcgctccccgctctcctccatgatccgaaccgaagaacaggtagtttttgcggcccagactgaccatccgcaacgcattttcagcgatgttattgtccgcctcagcccagccatcatctgcatagtacgtcagcgccggccactggttcagggcgtatgcgaacgctttcgccagttctgagtgtcgcgacagggttttcatcttttcacgcagccagctttccagggatttcagcagcggtttcgttttcaactgacgttcggcaaggcgctgctccgccgtcattccccttatctctgcctcgatggcgtacagttcgccgatccgtttcagcgcttcctccgtcagggctgacggggtgcgaacgtgcacatcgtggattttacggcgggcgtgagcccaacaggcggcttccgttatccggccatcccggtacagctcgttgaacccggcgtatgcatccgcctgcagtacaccactgaaccccgcaagatgggtctgcggatggatgccttttctgtccgggctgtaagcgaaccacaccgccggcgccagcgttgacccggcgttacggtcgtcacgaacgcaggtccataaccgcccggtcttcgttttcttattgcctggcaacagcaccgggacaggcgtgtcatcagcatggagcttaccgtcagtcagcacatagccatgaagcgcctcttccagcggagacagctgccggcagcatgcatccacccagcccgacagcagtgaacggctcagctccacaccttgccggccgtatatttctgactggcaatacagcggggtgtgctctgcatacttcgaggtcagcacgcgggccagcagccccggtccggcgataccccgctcgatgggccgcgaaggtgcaggtgcctgcacgatggcatcgcactgagtacaggcatgtttttcccgtaccgtccggataacccggaaggcgctacgcatcaactccagctgttcggcggtatcctcgcccagatagctcagtgaaccgccgcagttcgggcagcacggcgccgcaggcaacagtcgcttttcgtcacggggtagtgattcagggaacggcttacgggtgcgggtctgacgcaacggacgctgtactgccgggtcatacaccctaccagtcagcgtatcgctctctttctgaagccggttcagatcggcttccatttgtgcgatacggcgggagactttttcggaacgactgccgaagttcatccggcggagtttatccagctgcgcctgcagatggtctatttcgcgctcccggttgctcagcttttcctgcagggcgtggatcagcgcttcctgttcggccaggcgctgttttagcaggaagatgtcgtcagaagagatgtcgttcataagcccgtattttaccgggcatggacccagcacgcaacttctgtctgtgcaccaccttcacgtttggcactgaagagatgtcgttcatacatcgtgtatttttcgccgggcatggacccagcacgcaacttctgtctgtgcaccaccttcacgtttggcactgaacagccgatcgtaaccgctgaatgcatccgcctgcaggataccccggaagggacgaaggtgttgtaccggatgttttccctgcctgtctggtgagtaggcgaaccagaccgccggtggctctgatgagcccgcattccggtcatcccggacatacgtccagatgtgtcctgtttttgccttttttctgcccggtgtcagcacttttaccggtgtgtcgtcagtgtgaaccttgcgggtgttcatcacgtaacggtacagggcatcatttagcggagtcattaactggcagcacgcgtcaacccagttggagattaatgcacggctcagttcggcaccctgtcgggcaaagatttcactctgacgatacagtggcaggtgttcgcagtattttcccgttaacacgcgggcaagtaatccggagcccgcgatgccgcgcgctatcgggcgggacggcgctggcgcttcaactatacagtcacattttgtacaggctttttttacccgaacagtgcggatcactttcagggcgctactcaccagttccagctgctcagcactgacttcacccagataatccagctcactgccacactccgggcaacaactttcttcaggctccaggcggtgtatttcacggggaagatgtgctggtaacggacgacgatgacgtgactgtcgcaactggcggggaacctgcgggtcatcctcacgcccactgtaacgatcgctttcctgttcgcgttgtttcagttgggcctcagcctgttcaacctcacgctgcagtttttcagaacgggtaccgaacagcatccggcgcagtttttctatctgggccctcagatattctatttcccgctcctcctcttcgatcttttcttcggcacgtgccagtgcagagcgcaggaaggcctccgtctcttcaaccagactcagttgcagatctctctgacggagggcttcagcctgctgtccacgagagtagtttaattgagcgtgtaacttcatgatttaaaataatgtatatgattcaacttttaaaccgtataaccaaacgtataactaaaatgatttgctgaaaaaatgcacaattcagggtcggattttcccggatgtttaatttataaaaacgaagctggtggatgatctgcgtggtgatttccaccattcagagcaggggcggtcatcatgcccatgccataacaaaaaccccatattcgtggtttttctgtgttgtggctattctgccgttgccgtgctggtggatatttccgttatggggatcaccatatcggcatcatgcccaccagccagcgcaattttgcgctttgctttaagttcagcaagttaccgcgccggattacgccaatggctggaatatggcgcgtaatccatgagacaccagcacgccagcgaatcccatacgccgcaatgctgcgttagctgtctggctgttcatcggctgctgtgggtctttcagacttgggaaaacgtaattgcggtggtggctgattggtttcatggcctccagcaccgccatagcctgaccggaaagcgggataacgtgatccctgcgcatcttcatgcgtccggcaggtatcgtccattgcttcgcgtccaggttgatttcatcccaccgcgttgatgacgcttcggcgggacgggttacggtcagtaactgccattcaatcagtaatctggtctgccgttctgttgccgatactgataaagcctgcataagctccggcagctgttcggggcggattgttggcatatgtttttttacaggtgagggaaacgccttacgcacattcatagccggattggcatcaatcagcccactgttggcggcgtaatccattacctcattaacgcgctgtaaaacccgcttgagtgtttccaggttgccgcgctccttgatgggtgtaagcacttcaacgaaccttcgggcggtgagggtatctattggcgtgttgccgatgaacgggaatacatatttatccagcgaacgccagatgtctttaatcgtgttgggggccagattctggctgattttcacctggtaccatgccgccgccacattttcgaacgtgttcccttgtcttcgggcctctgtctctcttttttgcctctcgtggtcctgcgggtcagttccggcactgattaacgtcctgtactcgctacggcgttttctggcatcagccagggaaacatcttcaagcgatccaaaactcagcaatattctttttttgtccgatggtcggtagtaggaaaatctccagagttttgatccagacggtttgaccaggagaaaaagccctccgccgtcctgcagggtgtactccttttgcgctggtctggctgctttgatctgcactgtggttaatgggtgtgtttttctcgccatatgtctatgattccacacgaaaaacagggttttagttatacggctttagttatacgtcagcccgtataactaaacgtataactaaaaaatccggctgatagcttataaatccggtgatgttcggtgactaaaaaacataaaaaaacccgccaatcaagtgattagcgggttatccctgtcttatccggtgctttccggtgatatccggtgggcgatttggtcggctggctgaagcccaggcgaaggcagttgccactcaggatggtccgcagctcgacttttctgcggatatggagcggcaaaaaatgtcggcagaagggttaatggggccgtttgctttgaacgatccggccgcaggtacgaccggtccgtggtacaccaacggtacttttggcttaacggcgggctggcatctcgatatctggggaaagaatcgggcggagattactgctcgcctgggtacggttaaagcacgggcggcggaacgcgagcaaacccgccaattgctggctggcagcgtagcccgcctgtactgggagtggcaaacccaggcggcgttaaacacggtcttgcagcaaatcgaaaaagagcagaacaccattatcgcgaccgatcgccagctatatcagaacgggattacttcttcagttgaaggtgtggaaaccgatattaatgccagcaaaacccggcagcagctcaacgatgtcgcgggtaaaatgaaaattattgaggcacggttaaatgcactcacaaatcaccagacaaagtcactgaagcttaaaacggtcgcgttgccgaaagtggcaagccagcttcctgatgaactggggtactccttactggcgcggcgggcagatttgcaggcggcgcactggtacgttgagtcatcgttaagcactattgatgcggcaaaagcggcattttatcctgacatcaacctgatggccttcctgcaacaggatgcgttgcacttaagcgatctgttccgtcattccgcgcagcaaatgggcgttacggcaggcctgacgctacccattttcgatagtggtcgtcttaacgccaacctcgatatcgcaaaagccgaaagcaacttgtctatcgccagctacaacaaagcggtggttgaagcggcgattttcaacaccgtaacccgtcaggatatccgcgccatgcaggatcaggtgatggaattaagccgcctgaaaattcctcttttctttgcttacgacgtgctgcacggtcagcgcacggtgttcccgattagcctcggtctggcctcgtcttttaacctcgatgcagtgaaaacagtcgggcgtgtctctgcttatgaagcggcagatgatggcctgaacatgacctgggcaccgatggtcgatgtttcgcgcgatccgcgctggggacgtgcttccgaaggttttggcgaagatacgtatctcacctcaataatgggtaaaaccatggtgcaagcgatgcagggtaaaagtccggcagatcgctactcggtgatgaccagcgtcaaacactttgccgcttacggcgcggtagaaggcggtaaagagtacaacaccgtcgatatgagtccgcagcgcctgtttaatgattatatgccgccgtacaaagcggggctggacgcaggcagcggcgcggtgatggtggcgctgaactcgctgaacggcacgccagccacctccgattcctggctgctgaaagatgtcctgcgcgaccagtggggctttaaaggcatcaccgtttccgatcacggtgcaatcaaagagctgattaaacatggcacggcggcagacccggaagatgcggtacgcgtggcgctgaagtccggaatcaacatgagcatgagcgacgagtattactcgaagtatctgcctgggttgatcaaatccggcaaagtgacgatggaagagctggacgatgctgcccgccatgtactgaacgttaaatatgatatgggattgtttaacgatccatacagccatttggggccgaaagagtctgacccggtggataccaatgccgaaagccgcctgcaccgcaaagaagcgcgtgaagtggcgcgcgaaagcctggtgttgctgaaaaatcgtctcgaaacgctgccgctgaaaaaatctgcaaccattgcggtggttggcccgctggcagacagcaagcgtgacgtgatgggaagctggtcggcggcaggtgtcgccgatcaatctgttactgtgctaacagggattaaaaacgccgtcggtgaaaacggtaaagtgctgtatgccaaaggggcgaacgttaccagtgacaaaggcattatcgatttcctgaatcagtatgaagaggcggtcaaagttgatccgcgttcgccgcaagagatgattgatgaagcggtgcaaaccgcgaaacaatctgatgtggtggtggctgtggtcggtgaagctcaggggatggcgcacgaagcttccagtcgtaccgatatcactattccgcaaagccaacgtgacttgattgcggcgctgaaagccaccggtaaaccgctggtgctggtgctgatgaatgggcgtccgctggcgctggtgaaagaagatcagcaggctgatgcgattctggaaacctggtttgcggggactgaaggcggtaatgcaattgccgatgtattgtttggcgattataacccgtctggcaagctgccgatgtccttcccgcgttctgtcgggcagatcccggtgtactacagccatctgaataccgggcgtccgtataatgccgacaagccgaacaaatacacttcgcgttattttgatgaagctaacggggcgctttatccgttcggctatggtctgagctacaccactttcaccgtctctgatgtgaaactttctgcgccgaccatgaagcgtgacggcaaagtgacacgttggcattgctgatggcagtgcgtacgtcgtccagcgagacgccctgattaaacagcgcctgcggattcagcccgacgcgtacggcgggcagcgagctgccgccaacatcgacatcaccgacaccgtcgatttgcgaaatcgtcggagccagctgcgtcgaggcgaaatcgtacagttcaccctgcgaataagtatcggatgtcagcgtgaggatcataattggcgcatccgacgggttcgctttgcgataggtcggacggctgggcatcccgctgggtagcagactttgcgcggcgttgatcgccgcctgcacatcgcgcgctgcgccgttgatatcccggtcaaaatcaaactgcaaaataatgcgcgtgctgccgagcgaactgctggaggtcatttcgctgactccggcaatgcgcccaagtgagcgctccagcggcgtggcaacggaagacgccattgtttctggtgacgcaccgggcagcgaggcgctgaccatgatcaccggaaaatcgacctgcggcagcggggcgactggcagcatacggaaacccagtatgccgcacagggtaatggcgaccgacagtaaaatcgtcgccaccgggcggtaaatgaagagggcaaaaaacttcacttacgcctcctcttcatgacgggcaaagcggcttttggtccacaatgccagacggtcgaacagcagataaatcaccggcgtggtaaacagcgtcagcacttggctgacaatcagaccgccgaccatgccgatacctaacggacgacgcagttccgcgccgaccccggtactcaacatcagcggcagcgcaccaagcagagccgccagagtagtcatcaggatcggacgaaaacgcaacagacaagcctggtaaatagcttcgcgcggcgacatgccttgctcgcgctcagcagccagcgcgaagtcgatcatcatgatggcgttcttcttcacgataccgatcagcaaaataatgccgataatggcaatcacatccagttcgctaccggcaatcattaacgccagaacggcgcgggtaaatcgaccacctttaagatgatgtgcggtttgctggtaccgacctctggtcaggcgctggtgctgggcatggatctgaaagagagttccggtaaagcgcgccagcatctcggctatatggcgcaaaaattttcgctctacggcaacctgacggtcgaacagaatttacgctttttctctggtgtgtatggcttacgcggtcgggcgcagaacgaaaaaatctcccgtatgagcgaggcgttcggcctgaaaagtatcgcctcccacgcgaccgatgaactgccattaggttttaaacagcggctggcgctggcctgttcgctgatgcatgaaccggacattctgtttctcgacgaaccgataactttcaatatgaccagtgatgagacgctgcgaattgtggatgagtactgtcatacccacaaactttcgcgctctaaggtaatcgacgcattactcagcgccacagcacctgtccttaacgatattaactgttattatcaacttgcaggcaaactgcagtcacgcttattaaatggagtgtatcaacgggatcttcctcacaaacgcaatgtcgtcagtgcagagaagtattgtctggagatctgggaaaacaaacttttcaccaaaagaatcctggagtttgacagttcaaatggtgttctgtacgcgctgaaacataaaagacactatcgccgggataagatgattggacgggttgaaagccggcgtatcaaagacatttgcgaataccagatgcaactgtccggggagaaggcaaaatatgcctgttttatttatattgaaagaacaatatacaatcacgataatccatccggtgggacacctgtaaaagcggctgttggtaatgcagtcatcctgctggcaaaagacgtgatatatgacgagtacttttttgatctgcggcagtcatttttcgtgagcgttaaagatctgatggcctctggcgcaaaaggtattccggagacacagaaatatccggacgtttattgctggatcccgcttttctccataaattccggcgtggtcattaccccggtctataaaattgatccccggaaacccgtaacggtaaaaaaaccggatcagatcactgttgtttgtaattacagagaataatctcagtcttctccgctcaccgcaacagtgtttacctcgctttatcttccgttcagtaaatacaaacctccgctctggcaggtacagggcgtggtttatctccggtactcccctgcacagtaataatcatcactgaaaatactgatcccgtcacggcaaaacgccatcccatattccggcaacacaaaatcatcttccgtttataccggcttcactgacaaaacagacaacctgtattgcctgtacacaacagtttctctcctggcaggaatattcccctactgattttttacgtttctccccggttgttatgccggtgaaggtggtgcgttgttttcatcatcaacgccggctgagattaacaacatccggaggagatttttatgaccaccccagtttcgctgatggatgaccagatggtcgatatgacgtttatcactcagctgaccggcctgaccgataagtggttttacaagctcatcaaggatggggcctttccggcacccatcaaactcggccgcagctcccgctggctgaaaagtgaagtggaagcctggctgcaggcgcgtattgcacagtcccgtccgtaatttttaaccactggcccttcgcccacagcagacgcaatctccggcctgccggcggcactctgctgcctgttatcccccgtgaggaatatgaaaatgaaaccacagtatcagacccgttacgagctgctccacgaaagctaccagaaatggctgaccggcttcacccggcacgccgtatcctggggcgtgtgtcatccgaatatctactacttccataatctgacgcccgggtgggtgtcattcaatggtgaaaaaccggagattgccatcgtaccccagagcctgcaccggctgatttatggccctgacaaacgggccacgccgcccctggatgatgatctgatagtgaatttatgcaccagtgaacatctgctggttcatcatccgatgctggaaggcattctcctgtctgaatgtgaacgtctgaggcagcgttctctggcaaataaactgattagcctcttccgtcagtttggtggcacggagttgcgcctcaaactggtctggctttgctggcttgatttaatgaccggaaacagccttgaagactggacggagaacctgaaacggaaatcagaaaaagagctgggggaatggatcatcgaccgtcagaagcagaacgcagcactgacggatctgatggatcagtacgtgctcctggcataccgcacaacggttgacggtaaccgtaactgatgccggttgtttccggaaggtgcggcaaaatacggaaatgatgatacccccggccctgcatgctcacctgcagagcgtgttcgtcgtcatcatactgagccatgacggatgtcttaagggcatcctgtcattgctgagctggcatgctgcggtacatgcctcaccctggtgacaataagtacatggcgacagcactccctgcaccgcaaaagagatgtacacggccggatgttatggctgaatgtttcttcgtcagatattcaggaacagttgtagtaacgaattttaccgatctctgtacacggccggacgccgtcagtgtatacgggcggacgttccatgctgcatgactacatccggcccggatgtcaatgagtccgtcaggaacgcttcgcttcgaaacccggcctggataccagcgccggcacgccgggaagaagttgatatggtggttgccggacaacagcgctcctggattgactgctgcatcactcaaccacgctgaatatcaaaggagagcgttaccgattaaaagagaaacggaaagctgtggtgatgacccaaaacaacacgacaatcagtgaggatggaatggtgaaaatcagactgcatcagtgtagaaaatatactggctggcatgaaaatggcccggctcgtggcgttgacatattctctcctgagcatcctgaatgactgcagttgctgtggaaaagtaagcagtctccacccacggcaccacttaacagacattcagtaactcaccccagactttctataacgcttatcggtgcactgaaaacaggagagtgcgcttaaaaccgcagaccgcattgcgggtgttactgcatgacagcctggcggtattgtgaaatgtcggcaggaaccgatgtctgcgcagggggaacttccgtgatcgggataagtgcagaagaaatcagatcacgacgtaaacctgcagtgcctgacgctgcaagtggcattaaccatgggacgttgccgatcccggattgcggaaacaggagcactattttctgccgcggggagtacctctggcagtaaatccggctcgctcatctgaccgtctctctcccggaaaagaccagaaatgagatcgtcacctcaacagcagggaagatgtcttgacagactggttatattgcatacgatttatgaagaaaaagacagcaaatatggaggctatagcggagaacaccctacgaaattcctgtgaaaaacgattgaaaaaacgatcagattcgattcgtttttatatgctttttgggcacgtggcgatgacgaactgttgcatgtgcagcaccagaatcatccagaaaggcagaacgattacgcatcaaaccaggagacagcaatatcaaggtaatacactgatttaaaatgaatttacagcaatacgtgaaaacattttttacttaaaggagacagatgcgctgaagacagtgcaggtatttttatataaaaatgagaaggttacgggatgtctatccagcacactatgaccggagaatatcagtcaggcttaaaaagacaataaatacagtgagttaaatacacagagaaaacgaaaacgtagtatcagagggtacatcttacaacagagactgaatttccggtttttcataaccggcacattccggaaagagcaggcggcccggagctcttctgacgccagtacctgccagattgttctgtacattctgtacatcatgtacggaggtttttgttaacgcgattgcgaccagtcccgccgccgccagataaatcaccggaacgcccgcccaactcatcaccagcccagccagtggtccggtcacgccaagcgataaatccataaatacggtgtaagttgccagcgccgccccctgattttgctgcggaaccgcttttaccgccactacgcccaatgcagggaacaccagcgaaaaccccgcccccgccagtaagacgccgattttcgccatccacggcatagttgccacgccaaccagtagcaggccgattatctcaacgctaaagcaaatcatcgccacgtttaagccgccgatacggttaatgccgttagggaataacaaacgcgtaccgacaaacgcacagctaaacagcgtcagcgcgaaagccgcaccgtcccaacctttagcgtcataaaacagcgtgataaaggtggcgataacgccaaatccggcggaagccagtgccagcgccataccgtacagccagacgcgcccaagcaccgcacgaaacggcagcggtttgcctttactggcttttaccgtcggacgcgggatcgccaacaaaatggccaccagtgccacgcccataatgattaacgctaacgcctgcaatccgccccagtgataaaacacgacacctaacggcgcacccatcgccatcgccccgtaagtgacaataccgttccacgaaatcacccgcccgatatgtagcgaaccaaccacgccaacaccccacagggtcgatcccgttccggcaaaactttgtccaatcccaaggattacgcgccccaggcacagtaataacaggctgatgacgggcagactggcggttaatcctgccgtcagatatcccagaccgctcaaaaagcagccgcataaaccgaagacgacaatcttttttggtcccagtaaatcggcgtaacgtccggcatgaggacggctcagcaaggtggcaaaatattgcaggctgataaccaaccctgcccagaatgcactaaatcccattacatcatggacatagcccggtaatacagcgagcggcaacccgatggtaaggtagctggcgaagttaaacatgacaatggagacaatgcgcaaattcaggcgcaatccgtttagcgcgggttcggctacgggttcgggcatgaggatcaccacatttttacaacagtgtttcatttttaccatgtgctgacgtgaaaatcagcagtaagaatcagaatattgctggcgtgactcccgctacacttaatacaaaaagtcacaaggaagccccaatggaaacccctcaacccgataaaacgggcatgcacattctgctcaagttggcctcgctggtagtgatcctcgcgggcattcacgcagcggcagatatcattgtgcagctattactggcgctgttttttgccatcgttctcaacccgctcgtcacctggtttattcgtcggggggtacaacgccccgttgccattacgattgtggttgtggtgatgctgatcgcactcaccgcgctggtcggcgtactggcggcatcgtttaacgaatttatctctatgctgccgaggtttaataaggagctgacgcgcaaactttttaaattgcaggagatgttgccttttcttaatttgcatatgtcgccggagcgaatactgcagcggatggactcggaaaaagtggttaccttcaccacggcgctaatgaccgggctttccggggcaatggcgagcgtgcttttgctggtgatgaccgtagtttttatgctgtttgaagtgcgccacgtcccttacaaaatgcgtttcgcgttgaataatccacagattcacatcgccggactacaccgcgcacttaaaggcgtttcgcattatctggcgttaaagacgctactcagtttatggacaggcataatcgtctggctggggctggagctgatgggggtgcagtttgcgctgatgtgggcagtactggcgtttttgctcaactacgtgcccaatatcggtgcggtaatttccgccgtaccgccaataggtgatatgaaccgttataaccggcgatttccgaatggggaaaccgagtgtgtttcgacacactatcattaactgaatccataggttaatgaggcgaaccgggggaactgaaacatctaagtaccccgaggaaaagaaatcaaccgagattcccccagtagcggcgagcgaacggggaggagcccagagcctgaatcagtgtgtgtgttagtggaagcgtctggaaaggcgtgcgatacagggtgacagccccgtacacaaaaatgcacatattgtgagctcgatgagtagggcgggacacgtggtatcctgtctgaatatggggggaccatcctccaaggctaaatactcctgactgaccgatagtgaaccagtaccgtgagggaaaggcgaaaagaaccccggcgaggggagtgaaaaagaacctgaaaccgtgtacgtacaagcagtgggagcctcttaatggggtgactgcgtaccttttgtataatgggtcagcgacttatattctgtagcaaggttaaccgaataggggagccgaagggaaaccgagtcttaactgggcgttaagttgcagggtatagacccgaaacccggtgatctagccatgggcaggttgaaggttgggtaacactaactggaggaccgaaccgactaatgttgaaaaattagcggatgacttgtggctgggggtgaaaggccaatcaaaccgggagatagctggttctccccgaaagctatttaggtagcgcctcgtgaattcatctccgggggtagagcactgtttcggcaagggggtcatcccgacttaccaacccgatgcaaactgcgaataccggagaatgttatcacgggagacacacggcgggttcttgcgaagcagactgacacgtccccttcgtctagaggcccaggacaccgccctttcacggcggtaacaggggttcgaatcccctaggggacgccacttgctggtttgtgagtgaaagtcacctgccttaatatctcaaaactcatcttcgggtgatgtttgagatatttgctctttaaaaatctggatcaagctgaaaattgaaacactgaacaacgagagttgttcgtgagtctctcaaattttcgcaacacgatgatgaatcgcaagaaacatcttcgggttgtgaggttaagcgactaagcgtacacggtggatgccctggcagtcagaggcgatgaaggacgtgctaatctgcgataagcgtcggtgaggtgatatgaaccgttataaccggcgatttccgaatggggaaacccagtgtgtttcgacacactatcattaactgaatccataggttaatgaggcgaaccgggggaactgaaacatctaagtaccccgaggaaaagaaatcaaccgagattcccccagtagcggcgagcgaacggggaggagcccagagcctgaatcagtgtgtgtgttagtggaagcgtctggaaaggcgtgcgatacagggcttttcacccgctttatcgttacttatgtcagcattcgcacttctgatacctccagcaaccctcacaggccaccttcacaggcttacagaacgctcccctacccaacaacacatagtgtcgctgccgcagcttcggtgcatggtttagccccgttacatcttccgcgcaggccgactcgaccagtgagctattacgctttctttaaatgatggctgcttctaagccaacatcctggctgtctgggccttcccacatcgtttcccacttaaccatgactttgggaccttagctggcggtctgggttgtttccctcttcacgacggacgttagcacccgccgtgtgtctcccgtgataacattctccggtattcgcagtttgcatcgggttagtaagacgccttatccggcctacgttcggcaacggctgtaggcatgataagacgcgcaagcgtcgcatcaggcgctgattgccggatgcggcgtgaacgccttatccggcctacagtcagcaacgtttatcggttgcttagaactgcgattcttcggtggagccggtcagcgcggtaactgaagacgtgccaccttgaataatggtcgtcactttatcgaagtaacctgtacccacttcctgttggtgagatacgaaggtatagccatctttcgcggcggcaaattccggctgctgcactttctcaacatagtgcttcataccctcgccctgggcataggcgtttgccaggtcaaacatgttgaaccacatgctgtggatacctgccagggtgatgaactggaacttgtagcccatatccgacagctgctgctggaagctggcaatagttttgtcgtcgaggtttttctgccagttgaacgacggcgagcagttataagccagcagtttgcccggatatttcgcgtggatggcttgtgcaaagcgacgcgccagttctaggtccggcgtggaggtttcacaccataccaggtcagcatatggcgcatacgccaggccacggctgatcgcttgctcaatacccgcatgagtacggaagaagccttcactggtacgctcgccagtaataaattcgctgtcatatgggtcgcaatcggaggtaatcagatccgccgcatcggcatcggtacgagcaaccagcagggttggaacgcccgtcacatcagctgccagacgcgccgcgaccagtttctgaatagcttcctgagttggcaccaaaactttgccgcccatgtgaccacatttcttcactgatgccagctgatcttcgaagtgaactgccgctgcaccggcttcaatcatcgctttcatcagttcaaaggcattcagtacaccgccaaaaccggcctccgcatcggcgacgatcggcaggaagtaatcgacatagcgcggatcgcccggctcaatgcccgcggaccattggatctgatccgcacggcggaaagtattgttgatccgctccaccaccgctggcaccgagtttgccggatagagcgactgatccggatacatgctggccgccaggttagcgtccgccgctacctgccatcccgacagatagactgcttcaatacccgctttcgcctgttgcagcgcctgaccgccagtcagtgcaccgaggctgttgatgtagccttttttcgactcgccgtgcagcagacgccacattttcgccgcacccagttgcgccagggtgcattccggattgactgaaccgcgtaatttcaccacatcttccgcgctgtacgggcgagtaatgccttcccaacgcggttgagtccactctttctgtaattcttcaatttgttgtgtacgggttttcatgtgcagatgctccatagttatgtggtggtttacgctaacaggcggtagcctggcagggtcaggaaatcaattaactcatcggaagtggtgatctgttccatcaagcgtgcggcatcgtcaaaacgcccatgggagaaacgttcttcgcccagttcgctggcaatgactttcatctcttcgcccagcatctggcggaacaaggctttagtcaccggtttgccattgctcaacgttttttgatgatggatccactgccagattgaggtacgggaaatttcagccgtcgccgcatcttccatcaggccataaatcggcacacagccattgccagagatccacgcttcgatgtactgcacagccacgcgaatgttggcgcgcataccttcttcggtgcgttcaccagcacaaggtgccagcagctgatcggcagtaatcggcgcgtcttgttcgcgcatcacctcaagctggtttttgcgggagccgagaatatcgttgaataccgccattgccgtatcagcaaggcccgggtgagcgatccatgtgccatcgtgaccgttattggcttccagcgatttatccgcttttactttgtcgagcacctggttattgcgctcttcatctttgctcggaataaacgccgccatgccgcccatcgcaaaagcaccgcgtttatggcaggttttaatcaacaggcgtgagtaagcattcaggaagggtttatccatcgtcactgcctgtctgtctggcaggacgcgatcgggatagtttttcaatgttttgatataactgaagatgtaatcccaacgaccgcagttcagaccaacaatatggtcacgcagcgcgtgaaggatttcatccatctggaacacggcgggcagcgtttcaatcagcaacgtcgccttgatggtgccgcgcggcagattaaagcgatcttctgcatagctgaagacttcgctccaccaggccgcttcctgccaggactgggttttcggcagaatcaccatcttgcgctctacaggtccggtaatctctacgcgacgatcttctaagtccgaaggaatcccgcgaattttccagtcagcataacgaatggaagctgtttccgaaataaaatcaggcaacattccgttatcgatatcctgctgctgctgaatacgcgctgccagaagtttattgcgttgtggcgtaaaatgcgtcaccagctcagtcagaaattctaccgcttcggcagtaagaatttgcttctcctgctcgccatacggccttgtaaaagccagttcatcgattgttgttgcctgttcagtcatcgtgcagctcctcgtcatggatccgaaaacttccccactgtgaacgaaggatcgttgtgcgcttttcgttcagcacaactaagactactcatttaaaatgcaaaatcaaaaacaatttccattttaattaaaaatacatgttaacttattgataacaatataaataaaatttattcacttactgaggtgtgtttcggaaataaaaaaggcacccgaaggtgcctgaggtaaggtgctgaatcgcttaacgatcgactatcacagaagattaatccagcgttggattcatgtgccgtagatcatatggcgtgatctggtagacgtaatagttgagccagttggtaaacagcaaattaccgtgactacgccagctcgctcgcggtgtattttgcggatcattgtgcgggaaatagttatacggtacatccgggtctagcccggcttccacatcgcggaaatattcctgcgccagcgtttgcgcatcatattcgggatggcccgtcacaaaggcaatgcgcttatctttgctggcaaacagatatgcatccccttcttccgtctctgccagaatttccagatcggtataatcacgaatcaacgctgccggaaagtcagcatagcgcgaatgcggtgccaggaatgaatcatcaaagccacgcgtcagaagcgcatgaggatggagaatatgatgctcgtaaacgccagagagtttgtcggtgcgggtttgcttaggaataccatagaggatattgagcgcggcctgtacagcccagcagacaaacagcgtcgaggtgacgtgatctttcgaccactccagcacctgtttgatctgcggccagtaagcgacatcattaaactccaccaggcccagtggcgcgccggtaactatcagaccgtctgatcgtaccgatgatattttgtatggaagaccatggtacacaaaatggacgatggggagaatgatctcatttaacacatcttcgccttacgccaacgctaatggaagattaagaaagtgggcaaaaaataataatatcagtttaaagtaagcttcagaatgaaattatatggacgaaaaatccctctatgcccatatccttaacctgactgcaccatggcaggttaaatcccttaccctcgatgaaaatgcaggttccgttactgttacagtcggaattgctgaaaatactcagttaacctgtccgacctgcaggaaatcctgttctgttcacgatcaccgacatcgtaaatggcgccaccttgatacctgccagttcatgacattagtagaagccgatgttccccgcgttatgtgcccggagcatggctgccagactctgcctgtaccgtgggcaggttccggcagtcggtacactctgctgttcgaatcgttcgtgctctcatggcttaaaatcagcaccgttgatgcggtcagaaaacaacttaaacttagctggaatgccgttgacggcatcatgacccgcgcggttaagcgaggcctgtcgcggattaaaaagcctttatcagtgcgtcatatgaatgtagacgaagtcgcctttaaaaaagggcataggtatataaccgtggtatctgatcgcgacgggcgggcactggcattaaccgatgatcgtggcacagagagtcttgccagctatctccgttcgcttactgacagtcagttgttggccatcaaaacactgtcgatggacatgaatgcgggctatataagagcagcgcgtatccatttacccaatgcggtcgagaaaatcgccttcgatcgcttccatgtggcgaagcaactgggcgaagtggttgataaaacccgccagaatgaacatccgcacctccctgttgaaagtcgtcgtcaggccaaaggtacccgcttcctgtggcagtacagcgacaaatggatgactgagtcccggcaggaaaagctgatgtggttgcgggaacagatgcaacagacaagccagtgctggacactgaaagagctggcaaaaaatatctgggatcgcccctggagcacagaacgcaggaatgactggttgcagtggatatcgctggcgtctgaatgtgatgtgccgatgatgaaaaacgcagcgaaaaccattaaaaaacggttatacggaatactgaatgcaatgcgtcatcgcgtctcgaatggaaatgcggaggcgctgaacagcaagatcagactgctgaggataaaggccaggggataccgaaaccgggaacgctttaaactgggagttatgttccactatgggaaactgaatatggcgtactgagtcttcccaccatgatcggggaagacccatatcagagcagacaacaaaaaacaaatgagatcaaggtaatatctcttcacttgcgggctcgaacagcaggcaattgccaatataataatctggcacaagggtgaaaaacgcgcaccgcataaaccgttgttattgcttacagattagccggatgccttaatagacatccgcgccttttcggttatggctcggaaatctacgaacatctacacagtttactggaacgttttgggccacagcgttcgcagcaccgtcctgatatgccgttctggcgattataagtcgacggattctggcaaatagacgatgatgatatgcttaatgatgttcaaagaaattaggccattattatattattgcttgcattttctttcattcctaaaagcacccgccattaatcccaggcgcattatgcaaaggaaaatgattaggtaaacaataagatttataatcaggaaaggcgactcgcaataaaacggaaagtcgccttaacattggtaaaatatgccctttactactcctgtatcatgaacggctcatcacatttaaagctgacgttgatccagactaccatatattgcctttatttcattttttacgccttcgccacggtacaccaaagacgtatcgtatcgttgatacttatcttcccgtgcagcactgaaccagttaaaagatccgacacacagcagttcttcatcctcaatcacaattttgctgtggacacgattaaccaatttcgtagcgatacccatcttattgagcttttcaacagcatcattcagcagatgttgtttctcctgacgcttatcatcatcgacatgcgctatattgcagtttttatccgtcaccacggtaatatcaatgccccgggaacgggccaaagccattgatgccagaaatcccgtttgctccactttttgccaagataaccaaggggaaataatcgttattttcttttgagctccggcaagagtcttgttcaaaaatccatcatgctgctccacaccatgcagcgttgaaatttgtgtatgtgcggaaattaaatcctgtcgtttctgaaactcaaattgcaacgcattattatctgaagaaaagagatattttgccaataaccctcgcggcgaaaatgcgggctgcatctcgataaggtccatatcgccaaataccagaaaactatctttagcgcgtgagacagcaacattgaggatactgctgttgctatcaagaaacctgccatcttcatgttttgagtagacaggagaaaagagaacaatcgccctttccgccccctgcaaggagtgcacagtccccactgtcagtgaaccctgctcgtctttgccattaatttccagcttacgcaatgacgttttgatagcattaacctgcgccgaaaatggcgtcacaacaccaacaactttgtacagtggttccccgtaatggcgctctatatcatccttatgtgccaccagccatgctgctattgtttcagcttcaagagggttataacggcttcctccatttggcttcatgcctctaccatcaatatgtaaatatcccattgcggggaaaatcgtccctttttccatccctcttttaggctgcaacttaccgtgatagcaaagtgagttacagtagccgatgaagtggtttactgaatttggccacctgaacagaggtgatatgctcacctcagaacaacacaggtgccataatgaaaaaaagaaatttcagcgcagagtttaaacgcgaatccgctcaactggtcgttgaccagaattacaccgtggcagatgcagccagcgctatggatgtcggcctttccacaatgacgcgatgggtgaaacaattacgtgatgagcggcagggaaaaacaccaaaagcctcccctattaccccggaacaaattgaaatccgtgagctcaggaaaaagctacaacgtattgaaatggaaaatgaaatattaaaaaaggctaccgcgctcttgatgtcagactccctgaacagttctcgataatcgggaaactcagggcgcgttatcctgtggccactctctgccatgtgttcggggtccatcgcagcagctacaaatactggaaaaaccgtcctgaaaagccagacggcagacgggctgtattacgcagccaggtacttgaactgcatggcatcagccacggctctgccggagcaagaagcatcgccacaatggcaacccagagaggctaccagatggggcgctggcttgctggcagactcatgaaagagctggggctggtcagctgtcagcagccgacttaccggtataaacgtggtggtcatgaacatgttgctatccctaactaccttgaacggcagttcgccgtgaccgagccaaatcaggtgtggtgcggtgatgtgacctatatctggacgggtaagcgctgggcgtacctcgccgttgttctcgacctgttcgcaagaaaaccagtgggctgggccatgtcgttctcgccggacagcaggcttaccatgaaagcactggaaatggcatgggaaacccgtggtaagcccgtcggggtgatgttccacagcgatcaaggcagtcattatacgagcaggcagttccggcagttactgtggagataccggatcaggcagagtatgagtcggcgtggaaactgctgggataacagcccaatggagcgcttcttcaggagtctgaagaacgaatgggtgccggcgacgggctatgtaagcttcagcgatgcagctcacgcaataacggactatatcgttggatattacagcgcactaagaccgcacgaatataatggtgggttaccaccaaacgaatcggaaaatcgatactggaaaaaactctaactcggtggccagtttttgttgaccacttcacttatactcgccagggatatgcaattgaagcaattaccgccacgattgactggataaaagagaacggtttttcactcatcaaagccggtgtgaatccggaaaataccctttcaaaaaaattacttatcaggattggcttcaatttttcgagcatcgaagatgggtgagcatatttatgttctggattaaacaaaaggagaataatctcccgaagggaaaagccgatgaggccatttcaggcgtacttcaacatgcattcgtcagtgtcatctgccttttccagtaaatgggttggcattcaatttccaaagtacatcacactttttctactgaaacatatccctcctataactacgtgttaatattcgctccgtaaatacctttcaactcaacccgaggctttgatgctggagaatgtaatcatccgataatcagttccccgaccttttcaggccggactgattatcaatgcgccgaaatcgaatgcggacaccgcggtgtgtttgcacgttttgcacatgatgattaaacaggttcttcagtatgaatttatcccgtcaggaacaacgtacgttacacgttctcgctaaaggtggacgtattgcgcacgtccgcgattcttcaggccgcgtcacttccgttgaatgctacagccgcgaagggctgttgctgaccgactgcacgctcgccgtcttcaaaaaactcaaaaccaaaaaacttatcaagtccgtcaatggtcagccctatcgaatcaacactaccgggctgaataacgttcgcgctcagctcgataatcgctaaggagagtttcgatgacagcacaccacttcacttttcaaatcacagatgaaagtgatgccagtgatatccgggaagtcgaaacccgcgcatttggcttcagcaaagaagccgatttaacggcctctttacttgaggatgaaagcgcgcgccctgcgttatcgctgctggcccgacatgaaggcaaagccgtcgggcatattttatttacccgggcaaccttcaaaggggaaatggattcaccgctgatgcatatcctcgctcccctggcagtcataccggaataccaggggatgggcgtgggaggacggttgatacgcactggcatcgagcacctgaggttgatgggctgccagacggtttttgttctcggccacgccacctattacccccgacatgggttcgaaccctgtgccggagacaaaggctatccggcaccttatcccatcccggaggagcacaaagcctgctggatgatgcaagcactcaccgctcagcccatgaacgtgaccggccacatccagtgcgcgcaggccctgatgaaaccggagcactggcgtgaataacaatcttgttgtgccctttttaatgcttaacccaataacaggaattaactaatggatattccacgtatttttaccatcagtgaaagcgaacaccgcatccacaacccgttcaccgaagagaagtacgccacgctgggtcgcgtgctgcgcatgaaaccagagacccgaattctggacctcggcagcggctcgggcgagatgctctgcacctgggcccgggatcatggcattacggggactggaatcgacatgagttcgctcttcaccgcgcaggccagacgccgcgcggaagaactcggcgtcagcgaacgcgtacattttattcataatgatgcggcgggttacgtcgccaatgaaaaatgtgacgtagcagcctgcgttggcgcgacctggattgccggaggctttgccgggacagtcgaactgctggcgcagagccttaaaccgggcgggatcatgctcatcggtgaaccttactggcgtcagcttccggcaacggacgagatagcccaggcctgtggcgtcagctcgacgaccgattttctgacgctaccagggcttgtcagcgcgtttgacgacctcggctacgacgtggtggaaatggtactggcggaccaggaaggctgggaccgatatgaggccgcgaaatggctgaccatgcgccgctggctggaggccaatcctgacgatgacttcgccgccgaagtcagggccgagctaaacatctcgccgaaacgccacgtaacgtacgcgcgggaatactttggctggggcgtgttcgcactcatcgctaggtaacaacaggttcccggtatttctgactggagataccgggggcttagcctttgctttaatctgatgcatcacctgcacaatacatattcagtatgtttattaatcaagatgtcaccataaggagcatcatatgtcacaacatgaacagttctgtcaggcttgcggaatgccgatgtcggcaccagatgcacacagtgccagtgatcaatattgtgcgtactgcagcgacagcaacggcaatctcaaaccctgggaagaagcggtatcaggtttagccagcttccttgattcctggcaaaaagtcggcccggaggaagcacataagcgtgcaaaacgttatctgacggcaatgccagcctgggctcataaagcggagagtgatttgagctgattatctatactccctctgaatctattcaggagatccgatgttttcttacattatgctgggaaccaacgacctgccacgcgccattacattctaagatccgctgatggagatgctggggtatccacgtgcaggacgtaatgaagagggagcgtcctgcaacaaagtggtgcgataacagttaccgcgttttattcattctcattatttcaaccataatcactggtctctctagcccgtaactttcacaaacgttgagcgcttttattccactcggctcacataattttttatttgttcagctttgcgcgttttcacgtgaacgttctcacaattattcgaccagtctgcgcctataaaacgctcaacgagtgattgttttacggtctacggagatagctatgtcattttctgtgcaggaaaccctgttctcgcttttgcagcacaatgcgatttcaggacacgaaaacgctgtcgctgacgtcatgctgtgcgaattcaggcgtcaggcaaaagaggtctggcgagacaggcttgggaatgtcgtcgcgcgctacggtagtgataaacccgatgcgctgcgactgatgatttttgcgcatatggatgaagtcggttttatggtgcgcaaaatagagccttctggatttttacgctttgaacgcgtaggcggtcctgcgcaggtcactatggctggatccatcgtcaccctcaccggggacaaagggccagtcatggggtgtatcggcattaagtcctaccactttgccaaaggcgacgagcgcacgcagtcaccttctgtcgacaaactgtggattgatattggtgccaaagacaaagacgacgctatacgaatgggcattcaggtcggtacgcctgtcactctgtataacccgccgcaactcctggcaaacgatctggtgtgcagtaaagcactagacgatcgtctgggctgtactgccctgctcggtgtagcggatgctatcagtactacggagcttgatatcgccgtttatctggtagcttcggtacaggaagaatttaatatccgcggcattgttcccgtattacgccgtgtaaaacctgacctggcgattggtattgatatcactccatcgtgtgacacccctgatttacacgattattccgaggtcaggattaatcagggcgttgggatcacctgcctgaactaccatggtcggggaacgctggccggattaatcacgcctcctcgcctgatacggatgttggaacagacggctcttgaacacaacattccggtgcagcgagaagtggctcccggcgtgataacagaaaccggttatatccaggttgagcaggatggtattccctgcgccagtctctctattccttgtcgctatacccattctccggcggaggttgccagcctgcgtgatttgactgattgcatccgcctattgaccgctctggcaggtatgtcagcagcacatttccccgttgagcctgattcaggcactacacaagaggcacatccattatgaaaaagatccttgtggcatgcggtaccggcatgtcgacttcaaccatgattgcacacaagctgcaagagttcctgactgaacagggcatttcagccactaccgcccaatgctgtctgaatgagatccctcttaactgtaacggtatggaccttattgtaacctccatgcgaaccaacagtgattacggcatccctacgcttaatggcgccgccctgctcacagggatcaacgacgacgcgttaaaacaacaaatcaaggctctgttaactcaataaaaggaggcattatgtttgattacatcctgtctctcggcggtaccgttttcgtccctatcatcatgatcgtgattggccttatcttccgcatcccctggctgcaggcgattaaggcaggggtaacggttgggattggttttgtcggtatgggactggtgatcgtcatggcgatcgacagcctcagtccccctatcaaagtgatgattgagcgtttcggcctggccctgcatgtctttgacgttggcgcaggccctgcctccggcgttggttatgcgacagccattggcgccatgattatcccagttatttttcttctcaatgtcgccatgctggtcacccgtctgaccaaaacgatgaacgtcgatatttacaattactggcactacgccattacgggtacggtggtccagcttatgaccggtagcctgatttatggtgtgctgggggcaatctgccatgcggcgctatcgttaaaaatggccgactggacggcaaaacgggtacagaacatcgtcgggctggaaggtatttcgataccgcaaggctacggttccagttcagtaccgcttttcgttctacttgatgctatctatgaaaaaatccctttcatgaagggacgcaatatcgatgctcaggagatccagaaacgctacggcatggtcggcgatccggtgattatcggcgtagtgctcggtctgatttttggcctggcggctggtgaaggctttaaaggttgcgccagtctgatgattaccgttgcggcaatcatggtgctgttcccgcgcatgatccgcctgattgttgagggcctgatgcccatctccgacggtgcaagaaagttcttccagaaatatttcaaaggacgtgaagtgtatatcggtctggatactgctgtgacgctggggcatccaaccaccattgctgtcggtctgctactgatacccattatgttaattctggccagcattttaccgggcaacaaagtgttacccctcgcagacctgccggtagcaccgttctttatctgtatggctacggttatccaccgcggagacctggtcaggacgttgataagcggggtcatcgtgatgattaccgtcctgctgatcgccacccagttcgcgccttacttcactgaaatggcgctcaaaggcggtttcagttttgccggtgaaagtgcgcaaatctcagcgttgtccgtgggcaatatgttcggttggtcgatttctgaattgatgtcgcttgggattattggcgttgtcgtggcggtcggtattgtcgccagcgtcgtgctgttcttacgtaaacgtgaattatcggaataaggagtactttcaatgagttggctgaaagaggttattgggacggaaaaagcggtcatcgccatgtgccatctacgtgcattgcccggcgacccgagttttgatgcgcagttggggatgaactgggttatcgacaaagcctgggacgatctgatggcgctccaaaatggtggggtggatgcagtcatgttctccaacgagtttagtcttccctatctcacgaaggtgcgtccggaaaccactgcggcaatggcacgaatcatcgggcaattaatgagcgatatccgcatcccgtttggcgtgaatgttctgtgggatccggtcgcctcattcgacctggcgatggctaccggcgctaagtttatccgcgagatatttaccggtgcctatgccagcgactttggcgtctgggacactaacgtcggtgagaccatccgtcatcaacaccggattggtgcaggcgaagtgaaaaccttgttcaatatcgtcccagaggccgccgtgtatctgggcaatcgcgatatctgttctattgctaaatcgacagtatttaacaaccatcctgatgcgctctgtgtttctggcctgaccgccgggacgcgtacagacagcgcgctgttaaaacgggtcaaagaaacggtgcctgacaccgtcgtgttggccaacacgggcgtctgcctggaaaacgtggaggaacaactcagtatcgccgatggctgtgtgaccgcaaccacctttaaaaaggacggcgtttttgccaatttcgttgaccaggcgcgagtcagtcagtttatggagaaagtgcatcatatacgccgataagatagggataagcagagcgcttatccccggcaaagagcaataacccttctgcgatccctgccgccttcgtcaaaagtatcgacggggatcgctaccagattaacccgaatcggcatggagtcaacgacggatgattaacgatattaaatgggtacaggcacaacgtgaagccaccgactggcgtcaggccgtggaaatcgccacccgcccgctggtagcctatggtgccgcgcagccatgctacgttaatgggatcatcgaaaatacccttaactgggggccttattatctgatagccccaggaatcgccttgcctcacgcccgaccagagcaaggcgcaaactataatcaggtcagtatcaccacgctacgcaccccggtcgcctttggtaacgaggagtgcgaccccgtctggctgcttctctgcgtcagcgccacagatgccaacgcacatattttgaccattcagcgcatcagccagtttattgattcgccacaacgcttagcggcagtgggaaatgccagcacagacgatgcactgtttgcgctggtatcaggttaacggaggcgcttatgatcctgcacccttctctcgccagcgcaaatcctctgcactatggtcgtgagctgacggcattggacaatctggattttgggagcctgcatctggatattgaggacagcagcttcattaacaacattacgtttgggatgaaaacggtgcaggccgtcgccagacagacgcctcatcccttgtcctttcatttcatggttgcccggccacagcgctggtttaacgcgctggctgaaatcagacccgcgtggatcttcgttcatgcagaaacgctggactatccttcggaaacgttaactgagatccgccataccggcgcacgagccggactggtatttaatccggcaaccccgatcgacgcctggcgatatctggcgtctgagctggacggagtgatggtgatgaccagtgagcccgatgggcagggacagcggtttattccctccatgtgcgagaaaatccaaaaagtacgcacggcttttcctcagaccgagtgctgggccgacggtggaattacgctggcagctgcacagcaactggcagcagccggggcgcaacatatggtgattgggcgcgccctgttctcttcatctgactatcgcgcgaccttagctcaattcgccaccctgtaagaggagattgtttctgatgagccaacagagacctgaccgtatcaaacagatgctgcactacctgtggcaacatcgtcacctctccacacagcaggccatggagctttttggctatgcggaagcgactgtccgtcgtgatttccagtatattgccaaccagtatccaggcatgatccgcggtcacggttgcctggacttcgacgacagtacagacgacaaagagtacgtcttcgacgtgaaacgtacattgcaatctgtggcgaaaagagaaatagctgcccttgcccgaacaatgatcaaagatggcgactgcttttttctcgactccggctcaacctgcctcgaactggcgaaatgcctggccgatgcgcgggtaaaggtcatctgcaacgacattaaaatcgccaatgaactgggctgttttccccatgtggaaagttacattatcggaggactgattcgcccaggttatttttcggtaggagagagtctggcgctggagatgatcaatgccttttccgtagaacgtgcgtttatctcctgcgatgcgctgtcgctggagacggggatcaccaatgccaccatgtttgaggtcggggtgaaaacacggattattcaacgctcgcgtgaagttattctcatggccgatcactcaaaatttgatgccgttgagccgcatgctgtagcaacactatcatgtattaaaacgatcatcagtgacagcgggttacctgagactattgcacagcgttatcagcgagccggatgtcagttgtttttacctcattcaataaagtgataagtaagttcgttcgagagggatttcaagcaaaaataatcaatggcacccaatagaaaatattggcgatgcgctcgaacgaataaagaagccctatgcgcaatccacacgctacgatgttgcaacaacacgccatctactttttattctcattcactaaatgtggttgttctggattcattattcaaagtgtgtacaagatcacatttaatcacttcattacagttcagcatgctgaacaaagcatattttccactatgtaatgccgataccatttattccatgagcaagaaggagccattatggttcgcaaagggtgtaattcattagtccgtgctgaaaaaatattaacccacattgcatgggttggtatggcaagttatatggagttattaaataaattccagtaccccaaaagcagcctgcttaatttattgaatgtaatggtggagtgtggtttcttaattaaaaacaaaaacggctactattcactgggaataaaaaactacgaattgggttgtcaggcgttacaccgtcaaaatatatttgaggtgactaagcggccaatgcaggagttgtcgctgaaaagtggactggtttgtcatcttggggcgatggagagcatttcggctatctatctcgacaagatcgaaagtccggactctgtaccgacgagcaaaagctggattggcaaaaaacttgagttgcatattaccgcgttgggtaaggcattattagcctggaagacacgagaagaactggattattttttagaagcactcacgttaactccacatacgcgcaatacatttaccgataaaaaattgtttctggaagaattacaaaaaacacgccttcggggatgggccatagacaacgaagaatcaacctatggggcggtatgtttaagtatgccggtattcaatatgtataacagagttaactatgcaatctcactttctggcgatccggtagtttattcaggaaataagatagacagctatctggaattgctccggaaatgcgctgagcaaatatcatatgggctgggatacagaaacgaaaatgagcatttacgaaaaggaaactgaggtaatgaaaaaattcagcggcattattccaccggtatccagcacgtttcatcgtgacggaacccttgataaaaaggcaatgcgcgaagttgccgacttcctgattaataaaggggtcgacgggctgttttatctgggtaccggtggtgaatttagccaaatgaatacagcccagcgcatggcgctcgccgaagaagctgtaaccattgtcgacgggcgagtgccggtattgattggcgtcggttccccttccactgacgaagcggtcaaactggcgcagcatgcgcaagcctacggcgctgatggtatcgtcgccatcaacccctactactggaaagtcgcaccacgaaatcttgacgactattaccagcagatcgcccgtagcgtcaccctaccggtgatcctgtacaactttccggatctgacgggtcaggacttaaccccggaaaccgtgacgcgtctggctctgcaaaacgagaatatcgttggcatcaaagacaccatcgacagcgttggtcacttgcgtacgatgatcaacacagttaagtcggtacgcccgtcgttttcggtattctgcggttacgatgatcatttgctgaatacgatgctgctgggcggcgacggtgcgataaccgccagcgctaactttgctccggaactctccgtcggcatctaccgcgcctggcgtgaaggcgatctggcgaccgctgcgacgctgaataaaaaactactacaactgcccgctatttacgccctcgaaacaccgtttgtctcactgatcaaatacagcatgcagtgtgtcgggctgcctgtagagacatattgcttaccaccgattcttgaagcatcagaagaagcaaaagataaagtccacgtgctgcttaccgcgcagggcattttaccagtctgaggagaaactcatgtctgttcgcaatatttttgctgacgagagccacgatatttacaccgtcagaacgcacgccgatggcccggacggcgaactcccattaaccgcagagatgcttatcaaccgcccgagcggggatctgttcggtatgaccatgaatgccggaatgggttggtctccggacgagctggatcgggacggtattttactgctcagtacactcggtggcttacgcggcgcagacggtaaacccgtggcgctggcgctgcaccaggggcattacgaactggacatccagataaaagcggcggccgaggttattaaagccaaccatgccctgccctatgccgtgtacgtctccgatccttgtgacgggcgtactcagggtacaacggggatgtttgattcgctaccataccgaaatgacgcatcgatggtaatgcgccgccttattcgctctctgcccgacgcgaaagcagttattggtgtggcgagttgcgataaggggcttccggccaccatgatggcactcgccgcgcagcacaacatcgcaaccgtgctggtccccggcggcgcgacgctgcccgcaaaggatggagaagacaacggcaaggtgcaaaccattggcgcacgcttcgccaatggcgaattatctctacaggacgcacgccgtgcgggctgtaaagcctgtgcctcttccggcggcggctgtcaatttttgggcactgccgggacatctcaggtggtggccgaaggattggggctggcaatcccacattcagcccttgccccttccggtgagcctgtgtggcgggagatcgccagagcttccgcgcgagctgcgctgaacctgagtcaaaaaggcatcaccacccgggaaattctcaccgataaagcgatagagaatgcgatgacggtccatgccgcgttcggtggttcaacaaacctgctgttacacatcccggcaattgctcaccaggcaggttgccatatcccgaccgttgatgactggatccgcatcaacaagcgcgtgccccgactggtgagcgtactgcctaatggcccggtttatcatccaacggtcaatgcctttatggcaggtggtgtgccggaagtcatgttgcatctgcgcagcctcggattgttgcatgaagacgttatgacggttaccggcagcacgctgaaagaaaacctcgactggtgggagcactccgaacggcgtcagcggttcaagcaactcctgctcgatcaggaacaaatcaacgctgacgaagtgatcatgtctccgcagcaagcaaaagcgcgcggattaacctcaactatcaccttcccggtgggtaatattgcgccagaaggttcggtgatcaaatccaccgccattgacccctcgatgattgatgagcaaggtatctattaccataaaggtgtggcgaaggtttatctgtccgagaaaagtgcgatttacgatatcaaacatgacaagatcaaggcgggcgatattctggtcattattggcgttggaccttcaggtacagggatggaagaaacctaccaggttaccagtgccctgaagcatctgtcatacggtaagcatgtttcgttaatcaccgatgcacgtttctcgggcgtttctactggcgcgtgcatcggccatgtggggccagaagcgctggccggaggccccatcggtaaattacgcaccggggatgtaattgaaattaaaattgattgtcgcgagcttcacggcgaagtcaatttcctcggaacccgtagcgatgaacaattaccttcacaggaggaggcaactgcaatattaaatgccagacccagccatcaggatttacttcccgatcctgaattgccagatgatacccagctatgggcaatgcttcaggccgtgagtggcgggacatggaccggttgtatttatgatgtaaacaaaattggcgcggctttgcgcgattttatgaataaaaactgaaagcataaataaaaacatccagacacctgaattatccgactctgcatcattcgttatttgctcagtcggataatgatgggtcgctaccctgttatgagaggacgttatgccactaattatcgttgtggcagggattgctttactcctgcttttaaccataaaaattaagcttaatacgtttgtttcgttaattattgtctcgattgctgtcgccatcgccagtggtatggatttgagtaaagtcgtcacctcagtcgaatccgggcttggcggtacgctgggccatattggtttgatatttggcttcggtgttatgctcggtcgcttgctggccgatgcgggtggtgcgcagcgaatagcgctgaccatgctgaattatttcgggaaaaataaacttgactgggcagtggtctgttcggcgtttattgtcggtatcgcactttttttcgaagtcggtttaattcttctggtacctattttattcgctattgcccgtgaagcaaaaatatcaccgatgtttatgtgtgtgccgatgctttctggtttgctggtcgcacacggttttttgccgccgcaccccggcccgactgttatcgccagggaatatggcgctgatgtaggattggtactgatatacggtatcattgtcggcattccaacctttattctttgcggcccggtattgaataaattctgccagcgcattattccggacgcctttaaaaaagaggggaatatagcctctctcggcgcgacccgccgattcagcgaaagcgaaatgccaggctttgggatcagttttctcacggcaatgctgccggtgatcctgatggcggttgtcaccatcatccagatgactcatgccaaaagtgccgcggattctggcttattttacaacgtgatactgttcttaggtaattcgacgatcgccatgctgatttcactgctgttcgcgatctataccatgggcctggggcgcgggaaaacaatccctgacctgatggattcttgcggaaaagctatcgcgggtattgccggtctgctgctgattatcggtggtggtggtgcattcaagcaagttctcatcgactctggcgttggtcagtatatttccaccctggtttcgggtatggatattaacccgatcttgatggcctggggcgtggccgcattcctgcgtatttgtctgggttcagccaccgtcgcggcgatctctaccgccggtctggtcatcccattgttggcagtacatcccaataccaacctggccttgattacgctggctaccggtgccggatcctgtatttgttctcacgttaacgatgccagtttctggatgattaaagacttttttggcctgaccaccaaagaaacgctgttatcctggacgttgatgtccacactcttatccatcagtgggctgatttttattctgctcgccagcttagttttataatcgggttcttgccagtgagccaacctgttgttcactgtcccccataatttagtgagtgacggcaaccgtctgcacggtgacgaatcgctggcgatcaaaaaggggcgatattgaaccgtcgattatgcttgatgggtgtactctcagtaatactgtaaagccggagcatgtctccgactttacagtataggggaacagcaggcgatcgctcaaatggtatgctggtttatttcatgtaaaagaataaaatatctgtataaaatcatgccactggcaatctgcatcaactctccgggtaaacagggttaagatgagcatttccccggtttaatacaggtatacaaaagtggatagagatcaaacaaacagcagcctgttcaatgatgatcccgtacttcatgcaacatggctgtactatcaggaaggcaaaagccagactgaagttgcagctatcatgggggtgtcccgcgtcacggttgtcaaatacctgcaaacagcccgggaaaatggactggttcatatcaacctggatgtgaatgtctttggctctatcgacgctgctttgcaaattcgcgataaattcaatctccagagagtgatcatcgtgccggatggcgaacatgccggaaaacgtgatgatacaaagctgatgcggactcgcctttcacgtgccggtggcatgtatctgaatcaggtgattgagaatggtgatgtgctgggggttgcctggggaagaacaatccatcagatgagcaaaaccatgacgccgaagtcatgtaaaaatgtcaccgttatacagatgctcggttccatgccatctcagccagacctgacgatcattgaatcctcatcgcaaatcgcctacaagctttcaggccgtgtcgcctcgctgcacgtgcccgccgtggtatcaagcgccagactggccatggagttacaggcagagcctattattcgatcgaattttgacgttctgactcgctgtacgaaagccttttttgtcgtgggtaacgcgcttgatgaaaatcccctgattcgggtgggcgtgctgaataagaaggaaatgcagacgtatcgggatttaggcgcagtaggtgtcatttgtggtcgcttctatgacaaggaagggatgcccgtcgtggctgatgttgaccagcgtattctgggaatcagtctggctcagctaaggcagattgaacggaagatcttccttgctggtggggaaagaggctatgacgcaacgttgggtgccctgctgggaggatatgtcacggacctgattgttgatgaaggaacggcagagtttttgctggcgtgtgaattaccacactaaaagaatgaacaactgccccatgtggatatggggcaggattttattgattagcggcgataataagaacaatacccacaatgtatgaaataaacatggtcagcagcagtttattggttccggctggcgcactggcaaattctctccagatgaagactccccagatcacggcaatcattgtggccccctgtcccagaccgtaggaaatggcataccccgcctgaccagacgcaatcagactgaatgccagaccgacacaccaaatcataccgcccagccagccgcaaacatgatcccgtaagctcccggaaaaatacattttcccgttgaccggttctcctgaaataggttttttcatgaccagcgtgttaaggacaaagttcgacaagaacagccccacggcaaacagaacaagtgctgagtaaggcgtcatcagaccgctggcaggctggctgaaattgtcagacatggagtccgccaagaagcggaaaaaccatcccatgatgatacccgccagaatggcagtaatgagacctttattacggcgagatttatccgcctcctgcgtgacacgaccataggctatcgcggtaaaaataatggcgctcacaacgcaggcgacaccgaggaacagaatgagcggatcgccctgcggattgccgatataggtggtgatcacacccagagccagtgccagccccacacccacaggaaaagctaccgccataccggcaagattaatagaagcgaccagaagaatattggaaatattgaagataatccctgccagtattgccgacatcagactactgctgctcgcctgctgaatatcaggtataaaactgcgaccggcttcgcccatagaacccagcgtgaaggcaaataacaaagaacacagcaataatccaattgaataatcccaatagaatagagggaactcccattttttattgctgacaagtttagttgtattcgcccatgaaccccagcaaatcatggtaataaaacacattattatggcgacagcatacgattccacgataaacataaataactccttgtggtagttataatcaatcgttgtggacagagggaatagcagccattctgcgaatggctgtcatatgttattaattaaaataaagctgtaattacgctttcaaaccatacgttttgaatttttcaaggacgatggtcatttcggcttcagacagcacgggaacatcgtgatgtaatccgccacatttgatgtataaatcagccagcgtctcggtttcacccgccagccacaacgtcttttccagcgtgacgtccatggccagcataccgtggtgctgcatcagcaaggacttactttctctgattcctttagatacaccgtcggccagttcaggactgccaaaggtataatagggaatacagggaatatgatccgtccccgataccgccaccatataatgaatggccggaattgaatgattatgtattgccaccgccgtggaattcaccgcatgcgtatgtatgacagcattcaattctggtctggctttataacacgccagatgaaataaccattcacttgatggtattttacccgcttcaggtattcccttatcgtctacaaagacaatcatgtccggcgtcatctttgaataagcgatcccactcggcgtaatcaacatgccaccggtatacctggcactcacattacctgatgttccttgattaagacctgacgcattcatttcccgacaagtggaaatgattttttctgctaacttaatccgttccattcctgatccttaatagcaatggccgccgttttaatgctgttccccctggagtgctttactcttcaggtcagcaaacatatccgccagcgctgacttactggcagcacagactccccgctcagtaatgaagccggtaatgtatcgggcaggcgtgacgtcgaaagcgtagttcccacaacgggttccttcaggggcggtattgacccagctcaattctccctgagggtttatcccatagacatgggactgctcttttccgtcacgttgctcaatcggaatgctttttccgtcctcgatagtccagtcaatagtgggagaaggtaacgcgacgtagaagggaacatggttatcatgggccgccagcgccttaagataggtaccaattttattacagacatcccctctggccgtggttcgatcggtcccaacaatgcagagatcaacgtcaccgtgttgcatcaggtggccacccgcgttgtcggcgatcagggtgtgaggaataccgtgtgagcccagttcaaatgccgtgagtccgccctgattacgtggccgcgtttcatccacccagacgtgaacagggattccgttttcatgcgctttgtagatgggagaaagcgcggttccccagtctacagtcgccagccagcctgcgttacaatgtgtcaggatattgaccacactcccggccggttttttctgggctatttcgcggatgacttctgtaccatgtaatccaatttgttcacacaacgcgacatcttcctcggcaatttctgccgccagcgcccaggccacatccttgcgctctgatacacagagatccttcagtgtgtctatcatcctgtcgagggcccatttgagattaattgccgttggtcgggttttgataagaaggtcatagtaacgctgcagacccatgtcactggcatcgtgattcattcccagcgcgatgccataggctgcaacgacaccaataagcggagcgccacgaacccacatctcctgaatagccgtagcggccatttccgcagaggtaagcgccaccacctcgaacttaaaaggcaacttagtctgatcgatgatttctaccgcttttccatccccggaaacccagaccgtacgatagtgtttacctttaatattcataatgacctcttacttaaccttcgcagactggatgacggaatccatatttttaaactggcgggcattgacgataagatcgcgcgccatggtcaatgcacgtcgttcacatcctgcgcgaagctctgtattttcaatctgtttcagctcggcaacgccagcaaaaccaatgatccggcgattcatttccatgccggcattcaccagggaatcttcaagcagcgtggcaaaaaactgatcctgtgcgtcctcaagagcggccctgttctgttgatacatttctgtcggccacgcgtcgccctgtgttttgttgtcccagagctggcggaactcccgggtgaaaacggaccaggtttggacaatctgctgaagcagccattcctgatagtcagcgcgacgttgctcattcgcatcccacccagggcgtgagaagtacgccagcaggaggttgccaatatagttgccgatatcaaacgccattggccccatgaaaccgaactccggatcaatcactttggtatccgtgtcggtcaccatgattgagcctgaatgaaggtcgccatgtaacaatgcctgcgcttctgtcataaatttgtacttataacgcatggcaacctggatcatctctacatcagcccaggccttatggacggcatcgtccagctcaggagaagtccagttattccgttcagcgttgtaatagggctctgtgaagatcagatcttccgtaattttgcacagctcatgattcaacgcgaactcggcagtaagcgcttttttctgttctgctgacatgccaatgtcagacgtattgaagagagtctgtgctaaaaatctgccgatatcttcagctagtttagggaattttttaccgttaatcagttccttacgcagaatcacgtgaggagtcagatactccatggcaaacagcgccatttccgggtcgtaaaaatagacctgcggaatcagtgtgtgacccgcgtacttggcttcctgacataagacgttgtactcaaagcccgcacggctcagagataaaggccatccttcgccccctgcacgaagccagggcagagcttgttttacaatgatggttttatgtgtcccctcaacgataaacaccatgttcaggtttccgtcccccacttctgaaactttccactcttcaggtaaccctcccggttcgcatgaaggggtcagtctggacgagagataacccggcagcgtgtcacatgtcagcggcttgtaacctgatggaattgaatccgtcataacagttctccttgtctacacagaatgataatcaacttgtcatgtgacaactatacattatcaaatgtaaaattatttgtgacacatgtagattttttgaactgtataatattaaaaatgatgtcgtatggagtcatgatctttacaggaatcagcagaggaaaacatctattattaccatgtaattcatgttgttatgtcgcaacaatagtactgcacggggaattattacgggcaaacttaggcgaaaggaagtactgaagtgacagaataaatcacactttttgtacatatgtacttttctattgtcttttgttgtggaaacaaatagtgtttgtcatgccgatgctaatagacagatagattcgagggccaacagccccatcatcatgatggagcaacagaggtgagtctaacgtttccgcacttcttatcgatcggcactaacgatcaatatcgataaactgatctatcaaaacgattatctttcttgcaacctgcctggttatccttctcttacattgctcgcagaaaagcccttttattacggttagttatctagctgagacttgctacgcccattttccatgtaccccaaatcacgaggtcacaaaggcgcggaaagatgaagagatgtgcacgttgcaacaaaaaaagaagcgtccttgaacagaggctctcactcgataaagaattctgcgacgagtgcttattcgatatcgatgaggaaatcagggaaagaaggattatcacgatcagacgcctcaaagatgacaacgaaagaaaatcgtagctcaatatgaaaaatggaatcgatgtcagcgtcattatccctgcttacaacgccgctgaaaccagcgttagtttggttactaaaatcctcagtgaaccccacttggctattgaacttatcattgtcgatgacggttctactgatgaaactggcaacgttcttcgtcaaatccacgatgatcggctcattctcattgagcaggccaatcaaggtgtctatgccgcccgaaatgctgctctagccttgcaccaaggagaataggttatattccttgatgcggacgacgatatagcagatgggttcatagaaaaaagatggcaggcagttagtacgtcgcaagccgacgtcatgatctttaatggctggcattcctgtgctgaccaacatcgaagagcggttcacaaaaagcagccctatggtacgcctctgtcaggttattaatggattagacactgtgttacacaccgcgaatggccgcattatctgtggctgcagatggtcaggccatcctatgtcaggcagcattcactgcgcttccagtccggcaggagccataaagacattttttaaacggttcatcttgcagcgagcaatggttgattctgtacattggatataaaggactatatctatatcaacaataaggcctctatcacacatcggccggattactacgttgttcgtgctataaactatgttgaagtgatcgcgaaaatcatccaagtagcggaacaagaacaaaacaaaaaataaaggtatttttgtaccggcatgcgctggtagaggcacgtcattttttgggactctaccgcaatcgcgttggggataaatcgggcatgaaggactgcttcaaagcgaacatattcgcagcccatttattcagaggtatcagcagttttagcgatgtgtttttctttattaagctgctgggcaagctattctgataagttgtgcgttgctacacgacaccagcgcacagcttaatttcacgctttctgactaaattgttcaggccttttctataggtgcaaacacaactccccgtactttcctcttccaactcaaaatcatcgcaccttgctgacccaagaagggagcataccctgcactagtatccgcacagctaatactctattgataccaacaacgcttcagcacaacaaagtaactcgataatcacaactcaaagtgaagatgccaaaaactcgtttgagagcaataaattcaataacatgaaaaaaatgtattttgcattgaaaatcttacttattgcgcttggctacaattgcatgcttggtaatatagattataaaacaccagactagctgcctggtaagtaatgtaatagcagaggaaatatcacgatggatcttgtagatagtgtcgaagcaggtaagctgacgatcagtgaattgattgatgccctggcgaaagataaaaattactcagcttccaagtgggatcagcgataccgtgaatttacgaccttgctacaacaaacctcaactttttctgaacctgaaacggatggtttagtcaagaggctctggtatgaacgcgataacggtattgccagtattcgccagggcgttccatccttagcagaatatcagcaaagcctgccactgcttagagaactaactgaacgaattcggcaacagccggatgaagaaacttaccaatatgttggcaatgcactacaacaagctaaagaaaacggacttctcaagcgtatgtataggagtttgagaaatcgcgtctttgccgcgttctcgccagaaaactacaccagtactgtggatgagaatgcttttagtaaagcagcagaattcctaaatcagcacttccatctcggtctggcactgaccggaaattggttacagaaaaactatgaattgaaacaagccatacacgcccaatctcctgacacagatccttattacgtgaatatggccatctggcatctctatgaattgctccgtgaacgcgataatgaacaaaagcaggagaaaatagcgagcactacattcataaccagcaatgagcccatcgagaacaagatcatcctacattcaccaactaacgtgatcttctttggcccccctggcactggcaaaaccttcaggttgcagcaaaaaatgaaagagtacacttctcatgctgttccagctgatcgtgatgcctggctggattctcgccttgaatcgttgaattggatgcaggttataacgctggtgctgctcgatcttgggaaacgagccaaagttcgccaaattattgaacatatgtggtttcaacgtaaggcattattaaacggtcgtaatggcaacctatcgaatacagcctgggcagctttgcaatcctatacagttcccgagtcgttaaccgttgattataagaatcggcgtgagcctgccgtatttaacaaaacagataacagcgaatggttgctagttgattcacagctcgagcaagtggaggatttggtagagctctacgccgaacttaaacgaggccctaaatctgccgaagccatccagcgttttgcggtggttacgttccaccaatcttacggctatgaagaatttattgaaggtatacgcgctcgctctgacgagagtggcaatatctcttatcccattgagccgggtatctttatgcgcctttcccaacgtgccaatgccgatccaggacatcgctacgccattttcattgatgagatcaatcgcggtaacatatccaagatctttggtgaactaatctcactcattgaagtagacaagcgtgcaggcatgactcaaaatcatcgcaccttgctgacccaagaagggagcataccctgcactagtatccgcacagctaatactctattgataccaacaacgcttcagcacaacaaagtaactcgataatcacaactcaaagtgaagatgccaaaaactcgtttgagagcaataaattcaataacatgaaaaaaatgtattttgcattgaaaatcttacttattgcgcttggctacaattgcatgcttggtaatatagattataaaacaccagactagctgcctggtaagtaatgtaatagcagaggaaatatcacgatggatcttgtagatagtgtcgaagcaggtaagctgacgatcagtgaattgattgatgccctggcgaaagataaaaattactcagcttccaagtgggatcagcgataccgtgaatttacgaccttgctacaacaaacctcaactttttctgaacctgaaacggatggtttagtcaagaggctctggtatgaacgcgataacggtattgccagtattcgccagggcgttccatccttagcagaatatcagcaaagcctgccactgcttagagaactaactgaacgaattcggcaacagccggatgaagaaacttaccaatatgttggcaatgcactacaacaagctaaagaaaacggacttctcaagcgtatgtataggagtttgagaaatcgcgtctttgccgcgttctcgccagaaaactacaccagtactgtggatgagaatgcttttagtaaagcagcagaattcctaaatcagcacttccatctcggtctggcactgaccggaaattggttacagaaaaactatgaattgaaacaagccatacacgcccaatctcctgacacagatccttattacgtgaatatggccatctggcatctctatgaattgctccgtgaacgcgataatgaacaaaagcaggagaaaatagcgagcactacattcataaccagcaatgagcccatcgagaacaagatcatcctacattcaccaactaacgtgatcttctttggcccccctggcactggcaaaaccttcaggttgcagcaaaaaatgaaagagtacacttctcatgctgttccagctgatcgtgatgcctggctggattctcgccttgaatcgttgaattggatgcaggttataacgctggtgctgctcgatcttgggaaacgagccaaagttcgccaaattattgaacatatgtggtttcaacgtaaggcattattaaacggtcgtaatggcaacctatcgaatacagcctgggcagctttgcaatcctatacagttcccgagtcgttaaccgttgattataagaatcggcgtgagcctgccgtatttaacaaaacagataacagcgaatggttgctagttgattcacagctcgagcaagtggaggatttggtagagctctacgccgaacttaaacgaggccctaaatctgccgaagccatccagcgttttgcggtggttacgttccaccaatcttacggctatgaagaatttattgaaggtatacgcgctcgctctgacgagagtggcaatatctcttatcccattgagccgggtatctttatgcgcctttcccaacgtgccaatgccgatccaggacatcgctacgccattttcattgatgagatcaatcgcggtaacatatccaagatctttggtgaactaatctcactcattgaagtagacaagcgtgcaggcatgcccaatgcaatgagcctacaactggcttatagcggtgatcacttcagcgtacccgccaatgtcgatatcatcggagtgaagtggtttactgaatttggccacctgaacagaggtgatatgctcacctcagaacaacacaggtgccataatgaaaaaaagaaatttcagcgcagagtttaaacgcgaatccgctcaactggtcgttgaccagaattacaccgtggcagatgcagccagcgctatggatgtcggcctttccacaatgacgcgatgggtgaaacaattacgtgatgagcggcagggaaaaacaccaaaagcctcccctattaccccggaacaaattgaaatccgtgagctcaggaaaaagctacaacgtattgaaatggaaaatgaaatattaaaaaaggctaccgcgctcttgatgtcagactccctgaacagttctcgataatcgggaaactcagggcgcgttatcctgtggccactctctgccatgtgttcggggtccatcgcagcagctacaaatactggaaaaaccgtcctgaaaagccagacggcagacgggctgtattacgcagccaggtacttgaactgcatggcatcagccacggctctgccggagcaagaagcatcgccacaatggcaacccagagaggctaccagatggggcgctggcttgctggcagactcatgaaagagctggggctggtcagctgtcagcagccgacttaccggtataaacgtggtggtcatgaacatgttgctatccctaactaccttgaacggcagttcgccgtgaccgagccaaatcaggtgtggtgcggtgatgtgacctatatctggacgggtaagcgctgggcgtacctcgccgttgttctcgacctgttcgcaagaaaaccagtgggctgggccatgtcgttctcgccggacagcaggcttaccatgaaagcactggaaatggcatgggaaacccgtggtaagcccgtcggggtgatgttccacagcgatcaaggcagtcattatacgagcaggcagttccggcagttactgtggagataccggatcaggcagagtatgagtcggcgtggaaactgctgggataacagcccaatggagcgcttcttcaggagtctgaagaacgaatgggtgccggcgacgggctatgtaagcttcagcgatgcagctcacgcaataacggactatatcgttggatattacagcgcactaagaccgcacgaatataatggtgggttgccaccaaacgaatcagcgctctgacgagagtggcaatatctcttatcccattgagccgggtatctttatgcgcctttcccaacgtgccaatgccgatccaggacatcgctacgccattttcattgatgagatcaatcgcggtaacatatccaagatctttggtgaactaatctcactcattgaagtagacaagcgtgcaggcatgcccaatgcaatgagcctacaactggcttatagcggtgatcacttcagcgtacccgccaatgtcgatatcatcggagtgaagtggtttactgaatttggccacctgaacagaggtgatatgctcacctcagaacaacacaggtgccataatgaaaaaaagaaatttcagcgcagagtttaaacgcgaatccgctcaactggtcgttgaccagaattacaccgtggcagatgcagccagcgctatggatgtcggcctttccacaatgacgcgatgggtgaaacaattacgtgatgagcggcagggaaaaacaccaaaagcctcccctattaccccggaacaaattgaaatccgtgagctcaggaaaaagctacaacgtattgaaatggaaaatgaaatattaaaaaaggctaccgcgctcttgatgtcagactccctgaacagttctcgataatcgggaaactcagggcgcgttatcctgtggccactctctgccatgtgttcggggtccatcgcagcagctacaaatactggaaaaaccgtcctgaaaagccagacggcagacgggctgtattacgcagccaggtacttgaactgcatggcatcagccacggctctgccggagcaagaagcatcgccacaatggcaacccagagaggctaccagatggggcgctggcttgctggcagactcatgaaagagctggggctggtcagctgtcagcagccgacttaccggtataaacgtggtggtcatgaacatgttgctatccctaactaccttgaacggcagttcgccgtgaccgagccaaatcaggtgtggtgcggtgatgtgacctatatctggacgggtaagcgctgggcgtacctcgccgttgttctcgacctgttcgcaagaaaaccagtgggctgggccatgtcgttctcgccggacagcaggcttaccatgaaagcactggaaatggcatgggaaacccgtggtaagcccgtcggggtgatgttccacagcgatcaaggcagtcattatacgagcaggcagttccggcagttactgtggagataccggatcaggcagagtatgagtcggcgtggaaactgctgggataacagcccaatggagcgcttcttcaggagtctgaagaacgaatgggtgccggcgacgggctatgtaagcttcagcgatgcagctcacgcaataacggactatatcgttggatattacagcgcactaagaccgcacgaatataatggtgggttaccaccaaacgaatcggaaaatcgatactggaaaaaactctaactcggtggccagtttttgttgaccacttcagagccatgaatacagcggaccgttctttagctctgatggacacggctttgcgccgtcgctttgactttgtcgaaatgatgcccgatctctctttactgagtggagctaaggtgaaaggcatagagctcgagtcgttgttagagaaactcaatagccgcatcgaggctctttacgatcgtgaacatacgctggggcatgcgttctttatgccggtaaaaaatgcactcgatgccggtgatgaagaagctgcgtttaaacaattgaagatcgcattccagaaaaagatcattccgcttttacaggaatactttttcgatgactggaacaagatccggttggtgctggcagacaatcaaaagcaagacgacaacctgcaattcgtgattgagaaaaccgacgatctcgatacgctttttggtaacaaccatggtttacgacaccatgatcagcaatcaacagcttacgaactcaaagatttcgatcaagagatctggaatattccacaggcttatcgttcaatttatcagccccagcagactccccttgatgagcaggctgtaaatcatgggtgaagttatctccgtttttgaatatgacctattggggagtgacaaagcggcttcagttggcgcaaaactggtgcctccactggtctttaattatttagaagcgcttagcttggcaagtaatcaagggagccagttcctcaaactcacctctcgctcaggcttcaaattgcttcaggttcaaaactacgcggggatgctttcaacacctcacggtttccagcttgagatactgcccaaggttggtaaaaacctcacagcggctaatgcacgtcaaacattactgacgatgctaagccatttgcctgggtttcgacatattgaaactcagcaagccactcttcaggctcagcgtatgcctttgcttgagatttttattcaccagtttttgcatagcgttagccaattacttaaacaaggtttacgctccgactatgtgagcgagcaaggtaatctggcttttatgaagggcaagctgatgctttctgcacagctgcgacataacgcggtgaatcgccataagttttgtgtcgattatgatgactacatgcctgattgtgcagccaatcggctcttacactccgcgctagataagcttcttagtctaaagctgtcatcagagaatcaacgctggctttacgaactgcgctttgcgtttgacggtattccacttagccgggatattgaacgtgatataaacaacttacgcctcgagcgtggtatggctcattacaacgagccaatggcgtgggcgcaattgatcctgagaggaatgagtccgagtgctttgcagggaaacaccaaagcgatatcacttttgttccctatggaagcggtatttgaatcctttgtggcacagaccctaccctacgaattaccttctcatctcaaagtaataccacaagcggctacttattctcttgtgaagcacgggtctaacgattgctttaaacttcggccggatttgttgattcagtcacgtcgaccggtacaaaccaaattggtgatggacacaaaatggaagctaataaatagcaactcccaaaaaacaacacagtatgggctagcgcaagccgacttctatcaaatgtttgcctacggtcaaaaatacctaaatgggattggcgaaatgtacttaatctatcctgcgcatgatcaatttaaccaaccgatacagcagcattttgctttctctaaaacattaaaactatgggttgttccgtaccagataacagcaaaccgcggggagaggatgatgtgggtgaaggatgtgtccagtatataaatttctagccaagctggcgatgaaccagtcctctaaaaaatgggtataatcatagtttatttactaattaaattaatataaagtaattactttattatatggagaatttatgaaaatgggaaaaattgcagttactcctaataatgataaagcagccagccactctaaagatgaaaatttagccacaaatacaattaagaaaaacgtaaaacctaaatatggcgatgcggcatttttagagtacactcgactaatagttaaccacccgaattattttggaatgccagatccctttggggaaaaaggtgagattcaatgggaagctccatcaaatagggcatcggggaaatttaaacacactcatcaacggcgctatgaatggtggaaaaataaagccagaagtattgggatagaccctgacactgaaaaagcatggattagtaaaacagctaaactaattcatccacttggagttaaaccatgcaagaaatgcggtaaagaaatggaattatcttactcctacccaaatgagcatttcttttctcgggttaggaaacttaattatatagatgagacttttgagctatctcaaaatgaacacatagttgatttgttgactcgtttagatgatagatttggtgaaagaatatatttagatttaccacatttattttctacaaaatccatcacgattccagatatttcaagcaatctcgaagcatggattgagtatctaaaagaacaatacatacctcaagaatcacgtatgcttagccctggagccatggcaaatcctccagatcgttttgatggatttcattcatttaaccgctgttgtcgctctattgctgataaaggaaggaccaaagaaaatcttaaatcttatgttactgacagaagagttttcgaatattgggtggatggtgattgggtagctgcagacaggctaatgggccaagttagaacaaataatatatttattaacgaggaatgtttgaatgccggaaatggtggtttacatccaactccttgccaagcagatcacattggcccaatctcactagggttttcccatcgcccacaatttcaactactttgcaaatcatgtaatagtgccaaaaacaatcgtatgtatttaagtgatataatctctttattagaagctgagaatgaaggtcatacggttatttcatggttcgcagaagaagtatggaatcgactaaaacactctgtagatgatagtgaaaaagccttaagactaagtaaaatactacgtgataatagacatacatatatgaatcttcttaaaaaaataatggatgaaggttattatactttccttgcaagtcttttacatcttgaggtagccaattataacccaatatttgagggattatgcatttcaaatcatttaactcattataaatcattaaaaaaaataaaacgtgaatcaaaatatgctgctgtgcaaaaaacaagacgaatcagaatagcatttacttcattgaatgattatcatagaaaagaaaatcggaacgcatttattgtatcaaatgaattatctgagaagtttttctctgaagctatggataatttaaaatcattaagtgaaattacatcttgcttagatgaaaaaatatccggaataatatctgagaattcagattcaaaaaatgaatttcgaacaatcattacagatctacgagaaatagtgacaaacaataaagaaaaattcaacttgatattaaaatatctaatatcagggatgagcgaaataggaaaagaactggaatcatattgggaaaatgatcgttatgttcgctcaatcccagaagaatttatagagtaagacatagccctcttataaagagggctttatattcctttcataatattctgaaggagtaatattacctctcatgaataattgatagtcattttcggggtgatggatataatatttaccacttccatcttcaccatgttgcaaaggaggcagatcagataatgcatcctttacagatacccaagattccttatcttctgttaatttttgtggaggttcaattgaaaataaagggtcgtttgaaccaaccaatataaccctttttcggcgctgagggattgcataatgttcagagtttaatatccatccattcatagttttcatggttgatgagaattcttctttgactctttcaaagaccttacctttttccatattcaacaaaccagcaacattttcaaaaataaaaccgtttggttttatctcatttaagagagatttataatgcataaaaagtgaatttcttggatcatccattgttctggcatttcctgccgtagaaaatccctggcatgggggtccaccaagtatccataattgtttatcaaaatataatttcttaaatcctgatattttatctgctatttttgaaaaagtttcattatcagaaatgctgccacataaaacttctttgtgaacattgtttgaatatgtttgtagatatttttcttcaatatcattcgccaataatggagtccatccagcccatttgaatcctagtcccagccctccagctccggaaaataaatcgatataataaccagtattacctatcgccttctctatttctttcgcaatcagaaaagctaaaaatgggggcactgcattaccgatttgggtattaattgctgtttgacctccgaagaaaataaaatcatccgggaacgattgtagtcttgcagcttctctctgggatagaacacgatcttgctcatagtgaatatggcaaccattcccaggtcggttaaaatatgtattgatagtatatgcaggcatatctggaagtaatctaccgtagtatgttgaacggcttccttttccttgtgcataactatccctaatttgctctattcttttagacggtacatctaaaggaatatttttccagttgccacctggcggtactgagttaacaatcatcatatccaattcacttagctttgctgccttgtgattgggaatcataaatgtttcacttttagtcataatgttgaaaaatcctcaataaactttctttttcagctaactcaatcttatcaaatgaagacagaagcttattaaattcattcaaatccaatttgtaaatatttttggcaacataagcctcaattttcaactcagcatcacaacatccctctatgcaagaaatcacaagttgttttaattcagaatgttgtaataatattttttcagacggtattgcagtttttcgtaaggctgacaatgatacatgaccagtagctaaaaagcttcttaattgaaattcaaaacaaagggagtttataataccaagcaaactaaagagcgaatcttgcgaaccacttttataatagaccacccctaatgaattccctgccaaagagttaggaggtattatcgttgcaatcattcgccttttttgactcgggcgtgaaatgtcacgccatgcaatccttacgaaattagaattggatagaaccttatcaatttttttcgttattcttaagctcttctcattatgaaaattatacctcccaatcatttttcctttaatgaataataatccgccgccacttttttgtgtccagtcactactaccagtttcatctatttctcttcctgcccatatctctccatttttttccagactaccccatgttgggtatccctcttgcagctttcttaacaaatgaacggcatgaacaccttgagataccggaatgctaagatattgagaatctatactagacaaatcaaaaaaacctagtgatttaatatttaagtttttatcatacacactaagttgaatattatcattaagggattcacctttattaaaaataaaagaacatgaagaaacatcagcaccgccgaataatttagcctcagctggataataatttatgcaatcaatcctccctgaattaaaaaacttttcacgtaatatgtacgattgttcatctgcgaaaaaagatgcaggcataactatagctaccaatccatttttattacatatttctaagctaagttctgcaccaacacgtgaaagattagtcccccacccagcaaatttacgcttcggctgagaatatggcaatactcttgacaaataatcatcaaactcacgaagagagtctatatacatcgatttcatagatggttcaaaaaaatcgagctctctagaatctggttttatattctcccaaggcggattggttataacacaatcaaaataatcaacatattttttaaattcataaaaaacatcactattttttatagtaatgttaatatttgcacctgctaacttaagttcagacaacgcatttttagcataagtgaggcctgtattttctatatcgaacagataaacattccactctacatctggaaaaccatttatcatccattgtttaataagcaatgtaataagtcgaccatcccctgaaaatggatctgcgacattataactttttttatcacaggaatttatcaatggtaataacttctctatcatcaaaagagctatttttggatctgtatagtatttacctgtcgcttttttagtgaattttgttgtctcgtccaaggacagtgaattaattaaatggatatgtttcatgtaaaatatctcttccattaataatatggattatatcatttaacttgtgaacactcaacaataactgtacataaaaacagtcattaaagatttcccctagagtgagcatcgctataaaaatttaaattaattttatcctgctccgaaagaaacagttatcatttattccataaagaataacttgctttataatcactttaaatatcgatatcaattttaatactatggttacttaccatatcaataaatagcttaacccgttatctcgataccccttaagaaccccttccgcaactgcaacataatctacgctcatccacatgcctggtgcgtattaccgtgaaggagatcggtgagttattgagtgatctcctttcatgaaaatacgcacctggctttaactgttcctgatataagttgacagttttctgtccgtaaaacggttgatgaacttcatcgggcgttttgtatttcaatgccaaatgtgaccgctcatggttataaattgccacgaattcttttaccatttaccggccctacgtcagctctgcaggacgcgagagtaaaaactcattttcaggattccgtttatccactcagcctgcgcattctggtggcagttataaccattagtcattgaacaggttattgataaataattaaaaaactcagttttctggctcgcctgctcaagctgttcttcaagttccctgattctttgctcgggtgtcagcgggacagtcgccagagccacaggcagtctcctctttacctggtcaggaagtccggggctccagtcaagccggccatatttacgcaaccagacaagaacggtggagcgcccctgaatgccataactgcagccggcctgtttataagtcatctcgcctttttcaaccttctcaacaacggctattttaaaggatagaggataatcacgttgagtgcgtttgaacccagacatcatcacgttctccgggtttaagtcaggaacgtgtcatagctattcaggacgggtcaccgacacaaaaaaagtcgcccttgagcgactcgatttgcatacggtatggtgcgaaggccggactcaaacatgcgatttaacctcatgatttaaaattgttaataataaacaacaccatcctataccaacacagataccaacacgaaaaatcactggttttcggcatcgaaccaggacaatcaggtcctgattgagataccgagctctgttactcgtcatcttcctcgacaggctccattgcatcaagtggtactcgcaccatcgcgatagaaccaatccggataaaagcatcttccccatctatatcggttaactgatatcgcttacttgatgccggataattgtgtcgattggcaacagtgtactctttcgtacagccagaatgtggcagactgaggtggaatagataacgtccgtatgcccgctgaccacctccgggcgggagagtgtggtatctgacatcatcatttttcctttctgtttataaatgaaaatgccagccgtgttcaggctgacgtcagggaagtgaaatcgggtgagtgatcttcactggttctggtacaaaagttactgttggcgcagggtacggataccctccctggcctgtgcgatacagggcaacagtgctgccgaatctgttttatcctcatcgttgtcgaagataattcccgattcgcagtcgatattgtcctgcagccacgtaatcagaatatccagcgctgtttccgtggttaatgatttcatgttgtgaatttccggattaccagtcgaaagtgggtaaacccggcagatatccggcactggcatccagatgaatgagactgacaccataacaccggatgagtgtgacgaccagacgacggaacgtttttgacagccccaggcgcttaagccgcagaaccgggtatgaccacgtatcggtacgtaacagataaccggtaccggtaaaatgaatccattctgattcaccgaagtcactggtctggtgtgacagcgagtacagccaggcgttgtccgtttccgtgatatgtgcggtactgcagcgtatgccggtaagggcaacaaatggtggcgtgcagtctgctgaggtccggtcagattcatcaacaacacgaagggagtagccgttatcgcagaccatgttaatcagttcagcgagattaacaccatcaatgtcaacgacaatgcgccccatgttcagcgcctgcacgttaacgctgtcggcttccagcgtcagggccagtttcatcgtttcgcctccggatgcttccccagggtaatgttatttaccgttctgtaattgtcgcggatcatcaggcctgttgcccggcgagcccggaggatatcgatgctgtttattaactgagagtgggtacaggcgctgaatcccggcaggtcggtacgtaccagtgcgtatttttccacgagaaagttcactgcatcacacagtgaaatgcctgcctcaatatgctgctcaatcacacgttcatcagcgaacggtgtgtcattcagcgtaaggccgtagtgctggtccagcagtcgggtgagcagtgtctgccagatggtgactggagacgggcagcacgatacctcccgtacatgcgtgtcgggtaatgttttcatactgaagattttcctgatatgcagagataaaaaatgggacagtggcgtggtgaaaacaccaggccggagcagaaggttattctggtggtttactttttcgtttcaggtgtcggataaacagccagataaacgtaaccacaggagccgagggtgtcggcttcacaggtcagccccttcgcatacagtgtcacggtatgctgatggcggggattcagttcaccactggtgagcattaatttcagttgtttcatcagcagcggaaaggcctggtccagagggtacgcatccgcatctctgaaccggcctctgataccggcacggtcggcaaggtaatgcaaccggttaccctcctgcaccagacgggcgccgaaacagggcgtcactgtgcagggtagtccccaccagggatggtcgtcattgtcatcgggatgcgttgtcccggaaagtgtgtctgacacgataaaatcctcacagaaaatcggtgaatgatagtttaacgatgacgggtcagccggcgcgcagaccggcttcggtaaaggtgtattcgttgatgagcaggacctcatccacagcggcgtctgagctctgccagtcgtactcgttttccgggtgacggaacatcagttcagggtgacgctcatcagccggacatacggaccaaaactgtccttacggcgttctgcaaacacggccagcacaccgggaatatcctgcacttcacgaccggtatacgcttcagcactgccgtgccagcggtatttgccggtacagaacggaaaaagacgggatgccggatgctgacggtgaatacgcatggcttcgccacgggtgatgattttcatagtgggatacctccggatccaaactgggatgataatcctatacctgagggagacatggagggactaaccgtcgcagtcgttgcccatgaatgtactttatcacctatataagcccctgcaatagaaccaaatcccgggctaataaacgtaccagcaagtgaaccaatagcaattaattctgcctgcccgtcattcccgtcacctccagatatttgttttatttcattttcagatagttttctcatttcaacaccttcgctataagatttgtgaagaagtaaaaattcacgtttaaccacaacgataaaaatgtaactacaagtgataaaaaaaacatatatagattaaaaaaattatatccatagtaataactaagatataatgacaccggaatataaaagaacagataattgataacaaaagcaatcactgttatttttatatccttcttgacctcccccatcgacaaaactccttacaaagttacaccagtggattttaaatagaaataatcctgtcaacagttctcaacgtagtttctctgtgtgcaataatcacccgggtgatattcattttttttatggcagcattaacgaaacgttcactttctgtatcaagagaacttgtagcctcatccataaataatattccaggtttccggtataaagctcgggcaatgaatatacgctgtttttgaccgccggaaagaccttcccccagttcacctattaacgtttcataccccattggcattttcattatcacatcatgaatatgacttgctctggcacattctgtcatccattcgtcgtctgtttcttctgcaaacccacagatattttcacgaattgatcctgaaaatagccggtcgtcctgcataacacaggctatcatacggtgataattatttattccaagttgacgtatatccgtgccattaaccagtacttttccactatctggttcaaacagtccacataatactttcattaatgtggtttttccggcaccggaggcaccagttatagccacactttctcccggagccacagacaaattcagaccactgaatacctgtgctgactggctgtcataccggtagcttaaatcagtggtttccagtgaaaccgggctcatgtcagcaacgatttcaatttccggtttcttttcttccttttcatgtagtgcaatatctgcaatgcgctcattatgcagactcattattctcagttgaagaagaaaactggtcagcgaagcaacccgatccgaaaactgcccacgaaaagaaccaaatgccacaaacatccctattgtcatctgattatcgatcacaaggcttgcacccagccataaaatcgccacctgatcacaggcggcaacaaaagtatttattcccccgaagagcaaatccatcctggttaacttaatacctgaattgatcgcatctattttcaggttaagccagtgtgttccccggatcccgaccataccctggatttttaccgtggcaataccatacaggctttccataaaataggagctggcccgggcccccctgacaagagtttcttccgatatttgccggtaatagccgtatgtcaccagacgaataagaacgtaaaccatggtaaaaccgagaactatccaggtaagatatcctccatataacagcatcatcacaaaaacacccacaaccataatactgtccatgattgccccaaccacacaggtggtaaaggtccggtttcgtgaaactcagcatggaaatgttccggcgacacatctaatgctttttcctgcgtcagtagcgccagcattaatggtggcaccatcaggccgatataccattgtgcccatagtgagatcagcggtttgttctcgcggatcatcgttggttggttgcgatagatatgatcggaatagaccgcgagtagagaacttagcgcattcggtgatgaccattgcgccagcgtcatggcgttaagcggagcgggttcatccaggcggataaactcgagcaaatgttcacgatgtttggcgatcgtcgcacgtacggcttgtgcaagcccagcatcctgtggctggagatgcgttcgccagataacatcttcatagagcggtgcggaacgataggccataatcgggatagtaatctaaatgataatgattgctaatcctagcgataggtttatccgatagcaagggatttctctggcttgcaaatgataaaaattatcatatgatattggttatcattatcaatgaaagagatgaaaccatgttgcaacgtacgctgggcagtggctggggagtgttgctgccaggattgctgattgcagggctgatgtatgcggatttatcgcctgatcaatggcggattgtcattctgatgggattagtattgacgccggtgatgctgtatcacaaacagttacggcattacgttttgctaccatcgtgcctggcgcttattgctggcatcatgctgatgataatgaatttgaatcagggatgaaaaatcaaggaagaaacaagaaaggaagtaaagataattggtgcgaggggggggacttgaacccccacgtccgtaagaacactaacacctgaagctagcgcgtctaccaccttcgcacagtcatcttactttttttgatatcgcctcgtttggtgcgaggggggggacttgaacccccacgtccgtaagaacactaacacctgaagctagcgcgtctaccaattccgccaccttcgcccagtgcgagcaatatcaacgtggtttttggtgcgaggggggggacttgaacccccacgtccgtaaggacactaacacctgaagctagcgcgtctaccaattccgccaccttcgcataccatcaattcttaaaaagaattgctaccacggaggcgcattctagtggttttcagctttaaaagaccggatgctctgcgcagcattcgtccagtgctttatggattgctgccatcttttcatctttatgcgggtcacggatacgcagagttggcgcagcccttcgccacacaatccccgcagacggcaaccagcggcgaacggttccggcatttaactggcaaccggttatctcattgatttttattgccagcagttctgtactccagcgtgaacgctggtagccaaagtcgccgggagaatgttttaccagctcacgtaacagtgtgcagatatgctcaaacggccagcgacgggcacgcccggcaggtaatgatttcagtccctcaacacccgactgcgtgaaccagttaatccagcgtccaacagaggaacgggcgcagcagagcgttctggcaacgtcgctgacacggtcgccccggtgcagcatcagcatggcagtcagtctgcgggcataatttttatcgtgtgttttatggatggctttctgcatcaggcgtcgttcgtcacgggaaattggtgctatgatcggcattgctcagtccggttggtgatttgttttgatttggcgattgatcagatcgcacaatccgggctgagttccctcaaagtgatctactattccgcgcagctatttagctgcagaacaatagtaagcgtcaacggagcaccgtattgacgcttatttattggtgagaactacgttccatggcaggagttcgtcaacacggttggagggccattccggcagtatgctcagaatatggcgcagatacgcttccggatcgataccgttcagacggcaggtgcctgcttttccggcaacaagcaggaatctcagcgctgaagccgccgtgatcgctaccgaagaacacgtagaatatggcgcagatacgcttccggatcgataccgttcagacggcaggtgccgatcagcccgtacagcagtgctccacgctcgccgccgtgatcgctaccgaagaacacgtagatgatatgacctttatatactcactatagcattggtgggatattccagaggaggtcatcatgcattcggaaaatattgcggcttacgtcgggctggatgtgcataaagaaacgttggcggttgctattgctgcaccgcctcacaggccaccttcacaggcttacagaacgctcccctacccaacaacacatagtgtcgctgccgcagcttcggtgcatggtttagccccgttacatcttccgcgcaggccgactcgaccagtgagctattacgctttctttaaatgatggctgcttctaagccaacatcctggctgtctgggccttcccacatcgtttcccacttaaccatgactttgggaccttagctggcggtctgggttgtttccctcttcacgacggacgttagcacccgccgtgtgtctcccgtgataacattctccggtattcgcagtttgcatcgggttggtaagtcgggatgacccccttgccgaaacagtgctctacccccggagatgaattcacgaggcgctacctaaatagctttcggggagaaccagctatctcccggtttgattggcctttcacccccagccacaagtcatccgctaatttttcaacattagtcggttcggtcctccagttagtgttacccaaccttcaacctgcccatggctagatcaccgggtttcgggtctataccctgcaacttaacgccgtttcggcttccctattcggttaaccttgctacagaatataagtcgctgacccattatacaaaaggtacgcagtcaccccattaagaggctcccactgcttgtacgtacacggtttcaggttctttttcactcccctcgccggggttcttttcgcctttccctcacggtactggttcactatcggtcagtcaggagtatttagccttggaggatggtccccccatattcagacaggataccacgtgtcccgccctactcatcgagctcacaatatgtgcatttttgtgtacggggctgtcaccctgtatcgcacgcctttccagacgcttccactaacacacacactgattcaggctctgggctcctccccgttcgctcgccgctactgggggaatctcggttgatttcttttcctcggggtacttagatgtttcagttcccccggttcgcctcattaacctatggatttagttaatgatacagtcttatccgtttgtgatgagtgtggatgtcgccagcgattcttttatgcagacggcggagatgctgctggagaagaacgcaacgctgactatctggcagggcgtcattccgcagcgttatgtcaccggcgtggtggcggggtttggtatgcaggagaacaacggctggcagatgcgttatcacctgcgtattgagccgccgttatggcggtgcgggctgcggcggaacttccgtatcttccagcagcaggatatccggacgatatcggccatgctgctgaacgagaacggcgtcacagagtggacgccgctgttttatgaggaccatccggcgcgggagttctgtgtccagtacggggaaagcgacctggcgtttctggcgcggctgtgggcggaggaggggattttcttctttgagcggtttgcggcggacagtccggagcagaagctgacgctgtgcgacgatgtggcggggctgtcacaggcgggggagcttccgtttaacccggacacatcggcaggagcggagacggagtgtgtcagtatgttccgttatgaggcgcatgtccgcccgtcatcggtgcagagccaggattacacgtttaaggtgccggactggccggggatgtatgagcagcagggtgagagcctgaacggacagcttgaacagtatgaaatatttgattatccgggaaggtacaaggatgaacagcacggcaaggatttcacgctgtaccggatggagagcctgcgcagtgatgcggaaaaggccacagggcagagtaattcgccgaagctgtggccgggaacgcggtttacgctgacggggcatccgcagaagatgctgaaccgtgaatggcaggtggtacagagcattctgtcaggagaccagccgcaggcgcttcacggcagccaggggagaggaaccacgctgggcaatcagttagaggtgataccggcggaccggacgtggcgtccacggcagcaaagcaaaccgaaggtggacgggccacagagcgccattgtcaccggtcccgcaggagaggaaatcttctgcgacgaacatggtcgggtacgggtgaagtttcactgggaccgttatcacgggatgacggaggagagttcgtgctgggtgcgtgtgtcgcaggcgtgggcggggccgggatttggtaatctggcgataccgcgggtgggccaggaggtgattgttgattttctgaacggggacccggaccagccgctggtcatgggccggacgtaccatgaggacaaccgttcgccgggggacctgccgggaacgaagacgcagatgacgatacggtcgaagacctataaaggaagcggttttaatgagttgcgctttgaggatgcgacggataaggaacaggtctatatccacgcgcagaagtcttccgcacgcacaatcacatggctggtccacggcggcagctgcatcatgcgtcgttcagccagtgcctgttcggcaaaggcgtcgtagcctttatagagcaatgtttgcaacagaggatgttccggatggcacttcgccctgtttacccgcacgcccggcacgaccggcgacctgggtgtaaagctgggcgaaacgttctgccgagcgaaaatcggcagaaaacagcgcgccgtccacatccagtaacgccaccagcgtcacatccggaaagtggtgacctttcgccagcatttgcgtgccaatcaagatcctcgcgccgccgcgatgcacttccgccagttgctgttccagcgcccctttgcggctggtggtatcgcggtcgatacgagaaatggggacaccagggaacaacggcgcgagcgtctgttcaagctgttcggtgcccagccccacgggtaccaggtgcgtggaaccgcaagaagggcactggcgcggcaccggacgctgactgtcgcaatggtggcagcgcaaatgctgttgcgcctgatgcagcgtgtagtagtgatcgcaacgtgggcattcggctatccagccgcagtcgtggcacagcagcgcaggcgcaaaaccccgacgattaagaaagaggataacctgattgttggcctgtaaatgctggcgcatacgggtgattaacgccggagccagacctgcctgcaccttctgaccttttaaatccagcacatgttgaattgccgggcgcgcattgcccgcccgacgggtcaggcgcagcaggcggtattttttctgctgcacgttgcataacgtttccagtgcgggcgttgcggagccaagaataattgggatttgctcgctatgcgcgcgatacaccgccaggtcgcgggcatgatagcgccagccttcctgctgcttgtaggagctgtcgtgctcttcatcaataacaatcacgccgagatttttaaacggcgtaaacagcgcggagcgggtgccgatgacaatcgccgcctcgccatttttcgctttcaaccacgccgaaagacgctcgctgtcgttcaggccggaatgcagaacttccaccggggcattaaaacgttcacgaaaacgggcgatagtttgcggtgtcaggccgatttccggcaccatcaccagcgcctgtttgccctgagcgagcacgttttccagtacactgagataaacctccgttttaccggaaccggtaacgcccgccagcagccaggcagaaaaagtatctgccgcgctatgaattgcgccaacggcggtggcctgttcggtattcaaccgcaaccgctcaccagaaacggcatagttcgttcgccagtcgctaaactctggtgtttcacttgctaaatcacacagaccttttttgcgcagtgcctgcaacgcggcatcattaaattcaagttccgcgacctgatcacgccagattttgccttgccgtaacgctgccagcgcctgttgttgctttggcgaacgtttcaggctgttcagatccaccgcctgaccttgttcagtggcaaaccagtaccacatcggcgcgttcgccgcaggccgcccctggcgcagtaaaatcggcaaggcatgaaacagcacatcgccaatcggatgatgatagtaatctgccgcccagagcagtaatcgccagacagagtgagtaaataccggctcaacgtccagcacttcaactaccgctttcagctcgttaagcggcagctcactgacatcgctcactgacaccacaacaccgatacgctcctgttgtttgccaaacggcacgcgcacgcgactcccggctttaaccgtcatgccttccgccatgagtaatggtttctatcattgttctctccttcaggatttattgttttattaccaaacggcaatctaatctaatcagattgaaagatttaaaagtgttattttgatcgcaaaatgaaagataaatattttattttgaaagtttatataaagagggtagtgaggagaatgagttgagttatgtaaagtccgtatcgggcagtgactaccgcttccttgtgcggggcgggatgctttaccatacttgcccctggttgaatctgttaaatggacccctcatgttcaagcgtcgttatgtaacattgcttcccctttttatgttgcttgccgcctgtagcagcaagccaaaacctactgagactgaaacgaccaccggaacgccgtctggcggcttcctgcttgagccgcagcacaatgtgatgcagatgggcggtgacttcgccaataacccgaatgcccagcagttcatcgacaaaatggtgaacaaacacggtttcgatcgtcagcagttgcaggaaattctctcccaggcgaaacgtctggattcggtactgcggctgatggataaccaggcaccaaccacatcggtgaaaccgccatcaggtccgaacggcgcatggctgcgttatcgcaaaaaatttattacgccggacaacgtgcagaacggtgtggttttctggaatcagtatgaagatgcgttgaatcgcgcgtggcaggtgtatggtgtaccgccggaaattatcgtcgggattatcggcgttgaaacccgctgggggcgcgtgatggggaaaactcgcatcctcgatgcgctggcaacgctgtcatttaactacccacgccgcgcggagtatttttctggcgagctggaaaccttcctgctgatggcgcgcgacgagcaggacgatccgctcaatctgaaaggttcctttgccggggcgatgggctacggtcagtttatgccgtcgtcttacaaacaatatgcggtagatttcagcggcgacgggcatatcaacctgtgggatccggttgatgcgatcggtagcgtggcgaattatttcaaagcgcacggctgggtgaaaggcgatcaggtcgcggtaatggcaaacggtcaggcgccaggcttgccaaatggcttcaaaaccatttcgcagcttgccgcggcaggtttaacgccacagcagccgctgggcaaccatcaacaagccagcctgctgcgtctggatgttggcaccggctaccagtactggtacggtctgccgaacttctacaccattacccgttataaccacagcacccattacgcaatggcggtctggcagttaggacaagccgtggcgctggcgcgcgtgcagtaactatttgcaagaggggggcgtgagcttccctctggctaatcagcttttttctgaatcctcctcgtaaaattgcaacgccaacaccatcttcctgacgaaagtgttatcttgtccggcataaatttttgactgacagaggttgtgatgactgacagtgaactgatgcagttaagcgaacaggttgggcaggcgctgaaagcccgtggcgcaaccgtaacaactgctgagtcttgtaccggcggttgggtagcgaaagtgattaccaaaaaagcgcatgttaaacaataacatgcgcttgtaatatggcggtgagggggggattcgaacccccgatacgttgccgtatacacactttccaggcgtgctccttcagccactcggacacctcaccaaattgttttgctaccaaacctcatgggtggcaacggggcgctactatagggagttggagtaaaacggtcaagaagaattttaatgataattattgtttgctcatactgtaaacaagttgtgcagtatatctacatcgagacaagttatggacttatacttccaaagtacttcatacatatcacaaaataaaaaggccggttaaaccgaccttttactcgttctttctcttcgcccatcaggcggtaaaacaatcagcgactacggaagacaatgcggcctttgctcaggtcgtacggggtcagttcaacagtcactttgtcgcccgtcaggatgcggatgtagtttttgcgcattttaccggagatgtgtgcagtaaccacgtgaccgttttctaactctacgcggaacatggtattaggcaacgtttcaagaacggtaccttgcatttcaatattgtcttctttggccatctaatcctctggggtatcactaccgtaatttgaaccggcaagataatgccgaagttctgtaaataagtaaagatttgcgcgctaaatcgcaacaaacaggttcggcacattactccgaaaacacacggctaagccgcaccaaaagcgcaacgtataagggagcggtgagataaacgataggcgttacctgacgcgaaaaattccttatcggcagcggggtaatgagcgtaaccaactctgcgaccgcaattataacactctggggagaaatgtgccgaaaacattcattcttgtggtgaaaacaagcaccgtggtacccagaaattattcggcaatcgtccgaggcgcatttgattgagataatttagataatcccggcggggaatttcgcaggcaccaagcgaagctgtgtgatcgttaaggacctggcagtcgataagtttaccgccatgaccaataaattcctcacagaagaccagtagcgccgttttggacgcgttttccatccggctgaacatggactcgccacaaaatagcgttccctgggccacaccgtacataccgccaacaagctcatcttcacaccagacttcgatggagtgggcatgaccgagttcgtgaagacgatggtaggcttcgaccacgccacgcgtgatccaggttccttcttcgcgatcgctggcacagccttcaatgacctgaccaaaggcgtaattcatcgtgacacgatagggcgagcgtttatgaaatcgtttcatactctttctgaattttctccagaactggcagagcacgaacggctgcggcgttcacatcccagtcacgctgcggcattaatgccaggcaccaccacgtttgtcgccaccacggaaggtagaagcagacgcccaggccaccgataccagctcactaacagacagaccagaatccgcaatcgcgaatttcagatcgataatgtcctgctcggtcgggttgtagatcggctgcggcagcggatcttgccagatcagatcttctttcggtacttccggcccgatgtaacgagatttcggccccatatccctgtgcgtcagtttgaaccaggcacgagcaaaggcttcgttgaacgcctgcggatcgttgaggaaacgacgagagatcttctcgaactcaggatcaaaacgcagcgtcaggtcggtcaccagcatcgtcggtttacgtttcttcgacggatcaaacggatccgggataatttccggtgcgtctaccgcttcaaactggattgcgccagccgggctgcgggtctgtacccactcatacttgaacaagttctcgaagaaatagttgctccactgggtcggcgtctgggtccagaccacttccagaccagaggtaatggcatctgcgccaacgccgctgccgtaagtgctcgcccagcctaaaccttgttcttcaatcggtgctgcttctggatcaggacctacgtttgatgtcggaccggcaccgtgggttttacccagcgtatgaccacccgcaatcagcgccacggtttcttcgtcattcatgcccatgttgccgaaggtcgcgcggatagctgctgctgccgaaagtggttcgccgctgtgatccgggccttccgggttaacgtaaatcaggcccatctcggttgcacccagcggtgctttcgccagcgcttccggatgacggtgagtcagccaggctttttcatcaccccagttaacatccagatccggttcccagacgtcttcacgaccggcaccaaaaccgaaggtacggaagccggagttttccagcgccacgttacccgcgaggataaacaggtcggcccaggagattttctgaccatatttctgtttgattggccacaacaggcgacgcgctttatcgaggcttacgttatccggccaggagttcagcggtgcaaaacgttgctgaccacgacccgcgccgccgcgaccgtcgattgaacggtaagtacccgcgccgtgccaggccatacgaataaacagaccggcgtagctgccccagcacgagaagatcaccaaagcactggcttgatacttttgagcctaaacgcttgacgcgtcttatcaggcctacaatcccgttgaaaatgctggttttgtgcgccacatccggcatattaaccatgacgtcgaatcggttgttcagagtgcccacgttgcatcacccgctgcaacacttccgcttccagctctgctaatcgtaccgaccctaaccggcgcggacgggggatatccaccgtcaaatccagaccaatttttccctcttcaattaacaacacccggtcagccatcgccaccgcttcgctcacatcatgcgtcaccagcaaaacggtaaaaccgtgcttcagccaaagcgacacaatcaaatcctgcatctcgagtcgcgttaaagcgtccagcgcaccgagtggttcatcaagcaacaataaacctggtcgatgaatcagcgcccttgccagcgccacacgttgtttctgcccgccagaaagtgcggcaggccattcccccgcgcgattctccagtcctaccgcagccagagcctgacgcgccgcatcgcgccactggcctttaaggcctaacccaacgttatcaatcaccgatttccacggcagcagacgcgcgtcctgaaacatcattcgcgtatcatcctgaatctcagccagcggtgtggtgcccgctaacacgtcgcctgcggttggcgtttccagacctgccagcaggcgcagcagagtacttttgccaccgccgctgcggcccaccaccgccacaaactgacctgccggaatatgtaaatccagttggttcaggacgatattttccgcgtaatgtttgcttactgcattgagcaacaatggtgtgccctggttcagacgagccgtattcataccgtggcctccttcaaatgataagccgggttccagcgcaaccagagacgttctaacagctgcgcgctgacgtcagcaagtttgccgagcagggcgtaaagaataatagcgactaccaccacgtccgtttgcagaaactcccgcgcattcatcgccagataaccaatgccggaattggcagaaatagtttcggcaacgatcagcgtcagccacatcaggcccaacgcaaaacgcacaccgaccataattgagggcagggcaccaggcaggatcacatggataaacagcttttttattcagaggctcactcttgcacaaagcatgtatctgaaagaaatctggggttatctgacccatgatgaacaggaactgtttgaagtcattaataaaaagttactggcacatttttctgatgccagctcataaagtgcgaaatatctgaggatgctggatagcttcaggcaagagaataatgattcttgcagatgtgtttttccggatacaaaaacaaaagtaaaaaattgcagcgccaggccacctttcaaagcagggaggcctgtaccgcgtcgaaaatttcagccagttaatgtaattgtctgaaccaggcacttcgcccgggcaggagaaggagcgtggttgcggtcatcctgtatactgaagtcgttatgaaggaataatacaaataattgcccgttttctctgtacgatagaggcaggtgtgtatgattgcattactatgtttttgtgatataaaaactaaatggtgagatatgcattttaaaatataacaaaaatcaccatgaaataagaataattatccacggagaacataaactgcagactgttacaatgcatgctgttcatcttgacaatgtcggtaatgactccaacttattgatagtgttttatgttcagataatgcccgatgactttgtcatgcagctccaccgattttgagaacgacagcgacttccgtcccagccgtgccaggtgctgcctcagattcaggttatgccgctcaattcgctgcgtatatcgcttgctgattacgtgcagctttcccttcaggcgggattcatacagcggccagccatccgtcatccatatcaccacgtcaaagggtgacagcaggctcataagacgccccagcgtcgccatcgtgcgttcaccgaatacgtgcgcaacaaccgtcttccggagcctgtcatacgcgtaaaacagccagcgctggcgcgatttagccccgacatagccccactgttcgcccatttccgcgcagacgatgacgtcactgcccggctgtatgcgcgaggttaccgactgcggcctgagttttttaagtgacgtaaaatcgtgttgaggccaacgcccataatgcgggctgttgcccggcatccaacgccattcatggccatatcaatgattttctggtgcgtaccgggttgagaagcggtgtaagtgaactgcagttgccatgttttacggcagtgagagcagagatagcgctgatgtccggcggtgcttttgccgttacgcaccaccccgtcagtagctgaacaggagggacagctgatagaaacagaagccactggagcacctcaaaaacaccatcatacactaaatcagtaagttggcagcatcaccggttgcgactgcagaaaaagcaccctcagtcgctacgggtcatgccagcatgtgccagcaccgccatcaactcggctttggaaccggcttccaggcccagcggttcgcccgaatgaatcagggactcaatcacgcggcggtgctggttaactttgatcggataaacgaggaagtaatcgccgttatagccgtaggattcccgcgctcgtttgaacgcggcgttaatggaacgcaaacggtgctgcaggatctgtgggaaacagaacagtgcaggcagacgctgaccctgtgcttcgcgagttttcactaactgcgcgagatcgacgcgagcttccgggtccgggcacacgctgatgtggcccagctcgttaacgtcatagtagttattgccccaccaggcaatattgtaagtacgcagcatcttgctggcttcctgggagctcattgcaacctcctgcatggagcgtagtacaccgtgttcgcccgctgacgaaggcaaacccatagacatgtcgtcagacatagcgaacctcaaattattttattaagtgtaaaacagttaacgactatcgcagcctggaactgcgataacaacccataagcacatggattttccagcagtgaatgctgacgctccaactgcgcaaccggtttctttttcataacattattaagcacataaccgaacgtaagtgtgacagttcggcgaaaccacgagaaaactcttgtttttacaagagcgcccttgttcagtcctcagtagctgtaaccagctcttgaatcctgagaagcgccgagatgggtataacatcggcaggtatgcaaagcagagatgcagagtgcggggaacgaatcttcaccagaacggtgagacaggttaagcagcagacaacggttcattatttcgtatcacctccacggccgcctgttaagacgaacccacaagccaaaactctgttttcaacccggctggaagtggcaacacgaaagaaacgtcgtgtgctttttatttaagccgcgcgccgcgttttataccccacaatggcagaaaattgcaaaagataaatacgcagaatgccagcattgtcaggaaaaatttccagccacgtttttaacagaatgagacacgattcaaaaaaaagtggaaattgggtgaagaactgacctaaaatagccatccagatgttaatccatccataccgattaacactcagactgccagtgtttttaacctgcagagtcgtggtaggatccgctaccacagaaaatccacacaacagtttgagctaaccaaattctctttaggtgatattaaatatggcaaaacacctttttacgtccgagtccgtctctgaagggcatcctgacaaaattgctgaccaaatctctgatgccgttttagacgcgatcctcgaacaggatccgaaagcacgcgttgcttgcgaaacctacgtaaaaaccggcatggttttagaaagattaattttatctacttgagcatgtaaactttgtatagaatgcaccaactctttttttcgaggtgggtatgatgacatatttgcaacaatcatggggtaatattttaattaatattgcatgttaatgaaaactatcaacgtattgatagtcgtttatttataggaaatgcttaataaacagaacacattaagttgattagaatgactccgcacctcatggacgatatgtttaattaaaaataactactagggtgtacgtttgatatatttatcttcatctaaattattactcttaccatatcaaaccactctttgcataaacatttcctgtaactatctaaaaataaattggcagataattaattaaagaataacagcaacgtattacgagatcacgatcaaattcataattgcctagttcaaagtatactgtccatcctcctcatacactaaatacaatagagtttatataattatatagagtgtgattacaatctccggcaatgacactgttagtgcaacagtaatcaggcctccctcttagtattgcttacgctgaaagaataactggcagcctgccacaccatgttgtctggcaacgaggaagaccgccattttcggttcaaggctctgctgaaaaatagcgattttcctgtgtggcacgctgtctgcgtttctctgcttctaagacaccaattatctattctccaactactagtctaaaagactagtatcactactatcagttatttaaatgatattgattgcctagagattcagggagctagtctagttattcagagaacggtatcttaacaattttgttatgattttaggagatctggatttctattcatgatgcttggcgacaaaaataaatg
